(19) United States
(12) Patent Application Publication
(10) Pub. No.: US 2015/0094377 A1
(43) Pub. Date: Apr. 2, 2015

(54) HEREDITARY CANCER GENES

(71) Applicant: Myriad Genetics, Inc., Salt Lake City, UT (US)

(72) Inventors: Kirsten Timms, Salt Lake City, UT (US); Brian Allen, Salt Lake City, UT (US); Anne-Renee Hartman, Salt Lake City, UT (US)

(21) Appl. No.: 14/561,938

(22) Filed: Dec. 5, 2014

Related U.S. Application Data
(63) Continuation of application No. PCT/US13/44494, filed on Jun. 6, 2013.
(60) Provisional application No. 61/656,333, filed on Jun. 6, 2012.
(60) Provisional application No. 61/814,068, filed on Apr. 19, 2013.

(51) Int. Cl. C12Q 1/68; A61K 31/138

(52) U.S. Cl. CPC C12Q 1/6886; A61K 31/138; C12Q 2600/16; C12Q 2600/156
USPC 514/651; 506/35; 506/16; 506/2; 506/18

(57) ABSTRACT

The invention generally relates to a molecular classification of disease predisposition and particularly to molecular markers for cancer predisposition and methods of use thereof.

### CROSS REFERENCE TO RELATED APPLICATIONS

[0001] This application is a continuation of and claims the priority benefit of Patent Cooperation Treaty International Application Number PCT/US2013/044494 (filed Jun. 6, 2013, published as WO2013184905), which in turn claims the priority benefit of U.S. Provisional Application Ser. Nos. 61/656,333 (filed on Jun. 6, 2012) and 61/814,068 (filed on Apr. 19, 2013), each of which is hereby incorporated by reference in its entirety.

### FIELD OF THE INVENTION

[0002] The invention generally relates to a molecular classification of disease predisposition and particularly to molecular markers for cancer predisposition and methods of use thereof.

### SEQUENCE LISTING

[0003] The instant application was filed with a formal Sequence Listing submitted electronically as a text file. This text file, which is named “1500-01-4U-2014-12-05-SEQ-LIST-PRJ-BGJ_ST25”, was created on Dec. 5, 2014 and is 1,522,744 bytes in size. Its contents are incorporated by reference herein in their entirety.

### BACKGROUND OF THE INVENTION

[0004] Cancer is a major public health problem, accounting for roughly 25% of all deaths in the United States. American Cancer Society, FACTS AND FIGURES 2010. For many types of cancer, up to 10% of cases can be hereditary. Knowing that a patient has an increased risk of cancer due to hereditary factors can help such a patient to take preventive actions to reduce that risk. Thus, there is a significant need for accurate ways of determining whether a particular patient has an increased risk of cancer.

### SUMMARY OF THE INVENTION

[0005] The inventors have discovered panels of genes, wherein a deficiency in any of these genes in a patient's germline confers an increased risk of specific cancers. Generally speaking, these genes may be sequenced in patients to determine predisposition to these cancers.

[0006] Accordingly, in one aspect the present invention provides a method for sequencing DNA. Generally, the method includes at least the following steps: (1) isolating from a patient sample a plurality of DNA molecules, each DNA molecule consisting of between 50 and 75,000 nucleotides in length, said plurality of DNA molecules comprising one or more exons of a plurality of genes consisting of between 10 and 200 genes, and said plurality of genes comprising APC, BRCA1, BRCA2, CDKN2A, EPCAM, MLH1, MSH2, MSH6, MUTYH, PALB2, and PMS2; and (2) determining the sequence of said plurality of DNA molecules. In some embodiments, the method further comprises comparing the sequences determined in (2) with one or more reference sequences. In some embodiments, the method further comprises correlating a difference between the sequences determined in (2) and the one or more reference sequences to a mutation in one or more of the genes in the plurality of genes. In some embodiments the plurality of DNA molecule comprises at least some certain length of intron adjacent to exon (e.g., at least 1, 2, 3, 4, 5, 6, 7, 8, 9, 10, 15, 20, 25, 30, 35, 40, 45, 50, 60, 70, 80, 90, 100 or more base pairs of the intron).

[0007] In another aspect the present invention provides a method for determining whether a patient has an increased risk of cancer, which comprises: (1) determining whether the patient has a germline deficiency in any of a plurality of genes comprising APC, BRCA1, BRCA2, CDKN2A, EPCAM, MLH1, MSH2, MSH6, MUTYH, PALB2, and PMS2; and either (2) correlating a germline deficiency in any of said plurality of genes to an increased risk (e.g., increased hereditary risk) of cancer, or (3) correlating the absence of a germline deficiency in all of said plurality of genes to no increased risk (e.g., no increased hereditary risk) of cancer (or to no identified increased risk due to the tested genes). In some embodiments, the method comprises correlating a germline deficiency in any particular gene in the plurality of genes to an increased risk of a particular cancer as shown in Table 4.

[0008] In another aspect the present invention provides a kit comprising: reagents for sequencing DNA molecules comprising one or more exons of a plurality of genes comprising APC, BRCA1, BRCA2, CDKN2A, EPCAM, MLH1, MSH2, MSH6, MUTYH, PALB2, and PMS2; and instructions for using said reagents. In some embodiments the kit comprises reagents for sequencing a plurality of genes consisting of between 11 and 200 genes, and said plurality of genes comprises APC, BRCA1, BRCA2, CDKN2A, EPCAM, MLH1, MSH2, MSH6, MUTYH, PALB2, and PMS2. In some embodiments the reagents are PCR primers specific for the plurality of genes. In some embodiments, the reagents are PCR primers specific for the exons (and optionally some certain amount of adjacent intron) of the plurality of genes.

[0009] In some embodiments of the above aspects of the invention, the plurality of genes further comprises at least 1, 2, 3, 4, 5, 6, 7, 8, or 9 genes chosen from the group consisting of ATM, BARD1, BMPR1A, CDH1, CDK4, CHEK2, TP53, PTEN, RAD51D, SMAD4, and STK11. In some embodiments the plurality of genes further comprises at least 1, 2, 3, 4, 5, 6, 7, 8, 9, 10, 11, or 12 genes chosen from the group consisting of BLM, CEBPA, FLCN, MEN1, PTCH, RET, SDH5, SDHB, SDHC, SDHD, TMEM127, and VHL. In some embodiments the plurality of genes further comprises at least 1, 2, 3, 4, 5, 6, 7, 8, 9, 10, 11, 12, 13, 14, 15, 16, 17, 18, 19, or 20 genes chosen from the group consisting of BRAF, BRIP1, FANCA, FANCB, FANCC, FANCD2, FANCE, FANCF, FANCG, FANCI, FANCL, FANCM, KRAS, MLH3, MRE11, NBS1, PIK3CA, PMS1, RAD50, and RAD51C. In some embodiments the plurality of genes further comprises at least 1, 2, 3, 4, 5, 6, 7, 8, 9, 10, 11, 12, 13, 14, 15, 16, 17, 18, 19, 20, 21, 22, 23, 24, 25, 26, 27, 28, 29, 30, 31, 32, 33, 34, 35, 36, 37, 38, 39, 40, 41, 42, 43, 44, 45, 46, 47, 48, 49, 50, 51, 52, 53, or 54 genes chosen from the group consisting of APC, ATM, BARD1, BLM, BMPR1A, BRAF, BRCA1, BRCA2, BRIP1, CDH1, CDK4, CDKN2A, CEBPA, CHEK2, FANCA, FANCB, FANCC, FANCD2, FANCE, FANCF, FANCG, FANCI, FANCL, FANCM, FLCN, KRAS, MEN1, MLH1, MLH3, MRE11, MSH2, MSH6, MUTYH, NBS1, PALB2, PIK3CA, PMS1, PMS2, PTCH1, PTEN, RAD50, RAD51C, RAD51D, RET, SDHAF2, SDHB, SDHC, SDHD, SMAD4, STK11, EPCAM, TMEM127, TP53, VHL. In some embodiments the plurality of genes further comprises at least 1, 2, 3, 4, 5, 6, 7, 8, 9, 10, 11, 12, 13, 14, 15, 16, 17, 18, 19, 20, 21, 22, 23, 24, 25, 26, 27, 28, 29, 30, 31, 32, 33, 34, 35, 36, 37, 38, 39, 40, 41, 42, 43, 44, 45, 46, 47, 48, 49, 50, 51, 52, 53, or 54 genes of any of Panels A-Q.

[0010] Unless otherwise defined, all technical and scientific terms used herein have the same meaning as commonly understood by one of ordinary skill in the art to which this invention pertains. Although methods and materials similar or equivalent to those described herein can be used in the practice or testing of the present invention, suitable methods and materials are described below. In case of conflict, the present specification, including definitions, will control. In addition, the materials, methods, and examples are illustrative only and not intended to be limiting.

[0011] Other features and advantages of the invention will be apparent from the following Detailed Description, and from the Claims.

### BRIEF DESCRIPTION OF THE DRAWINGS

[0012] FIG. 1 illustrates how a plurality of DNA molecules can comprise a particular DNA sequence with no single molecule comprising all of such sequence.

[0013] FIG. 2 is an illustration of an example of a system useful in certain aspects and embodiments of the invention.

[0014] FIG. 3 is a flowchart illustrating an example of a computer-implemented method of the invention.

### DETAILED DESCRIPTION OF THE INVENTION

[0015] The present invention is based in part on the discovery that hereditary cancer genes, and germline deficiencies in these genes, are responsible for increases in cancer risk attributable to heredity. “Hereditary cancer gene” and “HCG” herein refer to a gene wherein germline deficiency in the gene confers an increased risk for cancer. The inventors have discovered specific panels (e.g., pluralities) of HCGs that may be tested in a patient to give a comprehensive understanding of the patient's hereditary cancer risk. All of the HCGs in Table 1 below form a panel of HCGs (“Panel A”) useful in the invention.

TABLE 1

| Gene # | Entrez Gene Symbol | Entrez Gene ID |
|---|---|---|
| 1 | APC | 324 |
| 2 | ATM | 472 |
| 3 | ATR | 545 |
| 4 | BAP1 | 8314 |
| 5 | BARD1 | 580 |
| 6 | BLM | 641 |
| 7 | BMPR1A | 657 |
| 8 | BRAF | 673 |
| 9 | BRCA1 | 672 |
| 10 | BRCA2 | 675 |
| 11 | BRIP1 | 83990 |
| 12 | CDH1 | 999 |
| 13 | CDK4 | 1019 |
| 14 | CDKN2A (p16) | 1029 |
| 15 | CEBPA | 1050 |
| 16 | CFTR | 1080 |
| 17 | CHEK2 | 11200 |
| 18 | CTRC | 11330 |
| 19 | EPCAM (TACSTD1) | 4072 |
| 20 | FANCA | 2175 |
| 21 | FANCB | 2187 |
| 22 | FANCC | 2176 |
| 23 | FANCD2 | 2177 |
| 24 | FANCE | 2178 |
| 25 | FANCF | 2188 |
| 26 | FANCG | 2189 |
| 27 | FANCI | 55215 |
| 28 | FANCL | 55120 |
| 29 | FANCM | 57697 |
| 30 | FGFR2 | 2263 |
| 31 | FH | 2271 |
| 32 | FLCN | 201163 |
| 33 | HOXB13 | 10481 |
| 34 | HRAS | 3265 |
| 35 | KITLG | 4254 |
| 36 | KRAS | 3845 |
| 37 | MEN1 | 4221 |
| 38 | MLH1 | 4292 |
| 39 | MLH3 | 27030 |
| 40 | MRE11 | 4361 |
| 41 | MSH2 | 4436 |
| 42 | MSH6 | 2956 |
| 43 | MUTYH (MYH) | 4595 |
| 44 | NBS1 (NBN) | 4683 |
| 45 | NF1 | 4763 |
| 46 | NF2 | 4771 |
| 47 | PALB2 | 79728 |
| 48 | PIK3CA | 5290 |
| 49 | PMS1 | 5378 |
| 50 | PMS2 | 5395 |
| 51 | PRSS1 | 5644 |
| 52 | PTCH1 | 5727 |
| 53 | PTEN | 5728 |
| 54 | RAD50 | 10111 |
| 55 | RAD51C | 5889 |
| 56 | RAD51D | 5892 |
| 57 | RB1 | 5925 |
| 58 | RET | 5979 |
| 59 | SDHAF2 (SDH5) | 54949 |
| 60 | SDHB | 6390 |
| 61 | SDHC | 6391 |
| 62 | SDHD | 6392 |
| 63 | SMAD4 | 4089 |
| 64 | SPINK1 | 6690 |
| 65 | STK11 | 6794 |
| 66 | TGFB2 | 7042 |
| 67 | TMEM127 | 55654 |
| 68 | TP53 (p53) | 7157 |
| 69 | VHL | 7428 |

[0016] As will be shown in detail throughout this document, subsets of Panel A can also be used in the invention. Examples of subsets useful in the present invention are shown in Tables 2A to 2D below:

TABLE 2A
Panels B to G

| Gene # | Panel B | Panel C | Panel D | Panel E | Panel F | Panel G |
|---|---|---|---|---|---|---|
| 1 | BRCA1 | BRCA1 | BRCA1 | MLH1 | BRCA1 | BRCA1 |
| 2 | BRCA2 | BRCA2 | BRCA2 | MSH2 | BRCA2 | BRCA2 |
| 3 | MLH1 | MLH1 | CHEK2 | MSH6 | MLH1 | MLH1 |
| 4 | MSH2 | MSH2 | ATM | PMS2 | MSH2 | MSH2 |
| 5 | MSH6 | MSH6 | NBN | BRCA1 | MSH6 | MSH6 |
| 6 | PMS2 | PMS2 | PALB2 | BRCA2 | PMS2 | PMS2 |
| 7 | EPCAM | EPCAM | BARD1 | ATM | EPCAM | EPCAM |
| 8 | MUTYH | MUTYH | BRIP1 | BARD1 | APC | APC |
| 9 | APC | APC | PMS2 | BRIP1 | MUTYH | MUTYH |
| 10 | CDKN2A | CDKN2A | MSH2 | CHEK2 | PALB2 | PALB2 |
| 11 | PALB2 | PALB2 | MSH6 | MUTYH | CDKN2A | CHEK2 |
| 12 | SMAD4 | SMAD4 | TP53 | RAD50 | CDK4 | PTEN |
| 13 | BMPR1A | BMPR1A | MUTYH | EPCAM* | TP53 | STK11 |
| 14 | TP53 | TP53 | | | PTEN | CDH1 |
| 15 | PTEN | PTEN | | | CDH1 | TP53 |
| 16 | STK11 | STK11 | | | STK11 | ATM |
| 17 | CDH1 | CDH1 | | | SMAD4 | RAD51C |
| 18 | NBN1 | NBN1 | | | BMPR1A | RAD51D |
| 19 | CHEK2 | CHEK2 | | | ATM | BRIP1 |
| 20 | RAD51C | RAD51C | | | CHEK2 | BARD1 |
| 21 | RAD51D | RAD51D | | | RAD51C | BMPR1A |
| 22 | BRIP1 | BRIP1 | | | RAD51D | SMAD4 |
| 23 | BARD1 | BARD1 | | | MLH3 | CDKN2A |
| 24 | ATM | ATM | | | BRIP1 | CDK4 |
| 25 | CDK4 | CDK4 | | | BARD1 | RAD50 |
| 26 | | RAD50* | | | NSB1 | NBN |
| 27 | | MRE11A* | | | RAD50 | MRE11 |
| 28 | | MLH3* | | | MRE11A | MLH3 |
| 29 | | | | | HOXB13* | |

*Optional

TABLE 2B
Panels H to M

| Gene # | Panel H | Panel I | Panel J | Panel K | Panel L | Panel M |
|---|---|---|---|---|---|---|
| 1 | APC | ATM | APC | BLM | ATR | BRCA1 |
| 2 | BRCA1 | BMPR1A | ATM | CEBPA | BARD1 | BRCA2 |
| 3 | BRCA2 | CDH1 | BMPR1A | FLCN | BRAF | MLH1 |
| 4 | CDKN2A | CDK4 | BRCA1 | MEN1 | BRIP1 | MSH2 |
| 5 | EPCAM | CHEK2 | BRCA2 | PTCH | FANCA | MSH6 |
| 6 | MLH1 | HOXB13 | CDH1 | RET | FANCB | PMS2 |
| 7 | MSH2 | TP53 | CDK4 | SDHAF2 | FANCC | EPCAM |
| 8 | MSH6 | PTEN | CDKN2A | SDHB | FANCD2 | MUTYH |
| 9 | MUTYH | SMAD4 | CHEK2 | SDHC | FANCE | APC |
| 10 | PALB2 | STK11 | EPCAM | SDHD | FANCF | CDKN2A |
| 11 | PMS2 | | MLH1 | TMEM127 | FANCG | PALB2 |
| 12 | | | MSH2 | VHL | FANCI | SMAD4 |
| 13 | | | MSH6 | | FANCL | BMPR1A |
| 14 | | | MUTYH | | FANCM | TP53 |
| 15 | | | p53 | | KRAS | PTEN |
| 16 | | | PALB2 | | MLH3 | STK11 |
| 17 | | | PMS2 | | MRE11 | CDH1 |
| 18 | | | PTEN | | NBS1 | NBN1 |
| 19 | | | SMAD4 | | PIK3CA | CHEK2 |
| 20 | | | STK11 | | PMS1 | RAD51C |
| 21 | | | | | RAD50 | RAD51D |
| 22 | | | | | RAD51C | BRIP1 |
| 23 | | | | | | BARD1 |
| 24 | | | | | | ATM |
| 25 | | | | | | CDK4 |

TABLE 2C
Panel N

| Gene # | Gene Symbol |
|---|---|
| 1 | BRCA1 |
| 2 | BRCA2 |
| 3 | MLH1 |
| 4 | MSH2 |
| 5 | PMS2 |
| 6 | MLH3 |
| 7 | EPCAM |
| 8 | MSH6 |
| 9 | APC |
| 10 | PMS1 |
| 11 | PTEN |
| 12 | STK11 |
| 13 | RET |
| 14 | SDHD |
| 15 | SDHC |
| 16 | SDHB |
| 17 | SDHAF2 |
| 18 | CDH1 |
| 19 | MUTYH |
| 20 | SMAD4 |
| 21 | MEN1 |
| 22 | VHL |
| 23 | BMPR1A |
| 24 | PALB2 |
| 25 | TP53 |
| 26 | FANCL |
| 27 | BLM |
| 28 | CDK4 |
| 29 | CDKN2A |
| 30 | ATM |
| 31 | PTCH1 |
| 32 | CHEK2 |
| 33 | RAD51C |
| 34 | CEBPA |
| 35 | NBS1 |
| 36 | FANCA |
| 37 | FANCC |
| 38 | FANCD2 |
| 39 | FANCE |
| 40 | FANCG |
| 41 | FANCI |
| 42 | FANCM |
| 43 | RAD51D |
| 44 | FANCF |
| 45 | FANCB |
| 46 | BARD1 |
| 47 | RAD50 |
| 48 | MRE11 |
| 49 | BRIP1 |
| 50 | FLCN |
| 51 | TMEM127 |
| 52 | PIK3CA |
| 53 | KRAS |
| 54 | BRAF |
| 55 | HOXB13 |
| 56 | ATR |
| 57 | BAP1 |
| 58 | CFTR |
| 59 | CTRC |
| 60 | FGFR2 |
| 61 | FH |
| 62 | HRAS |
| 63 | KITLG |
| 64 | NF1 |
| 65 | NF2 |
| 66 | PRSS1 |
| 67 | RB1 |
| 68 | SPINK1 |
| 69 | TGFB2 |

TABLE 2D
Panel O

| Gene # | Gene Symbol |
|---|---|
| 1 | BRCA1 |
| 2 | BRCA2 |
| 3 | MLH1 |
| 4 | MSH2 |
| 5 | MSH6 |
| 6 | PMS2 |
| 7 | EPCAM |
| 8 | APC |
| 9 | MUTYH |
| 10 | PALB2 |
| 11 | CDKN2A |
| 12 | CDK4 |
| 13 | TP53 |
| 14 | PTEN |
| 15 | CDH1 |
| 16 | STK11 |
| 17 | SMAD4 |
| 18 | BMPR1A |
| 19 | ATM |
| 20 | CHEK2 |
| 21 | RAD51C |
| 22 | RAD51D |
| 23 | MLH3 |
| 24 | VHL |
| 25 | MEN1 |
| 26 | RET |
| 27 | NF1 |
| 28 | NF2 |
| 29 | RB1 |
| 30 | PTCH1 |
| 31 | FH |
| 32 | BLM |
| 33 | CEBPA |
| 34 | FLCN |
| 35 | SDHB |
| 36 | SDHC |
| 37 | SDHD |
| 38 | SDHAF2 |
| 39 | TMEM127 |
| 40 | CFTR |
| 41 | PRSS1 |
| 42 | CTRC |
| 43 | SPINK1 |
| 44 | KRAS |
| 45 | BRIP1 |
| 46 | BARD1 |
| 47 | NBS1 |
| 48 | RAD50 |
| 49 | FANCA |
| 50 | FANCB |
| 51 | FANCC |
| 52 | FANCD2 |
| 53 | FANCE |
| 54 | FANCF |
| 55 | FANCG |
| 56 | FANCI |
| 57 | FANCL |
| 58 | FANCM |
| 59 | ATR |
| 60 | HRAS |
| 61 | TGFB2 |
| 62 | FGFR2 |
| 63 | BAP1 |
| 64 | KITLG |
| 65 | BRAF |
| 66 | MRE11 |
| 67 | PIK3CA |
| 68 | PMS1 |
| 69 | HOXB13 |

### Aspects of the Invention

[0017] Accordingly, in one aspect the present invention provides a method for sequencing nucleic acids. Generally, the method includes at least the following steps: (1) isolating a plurality of nucleic acid molecules from a sample taken from a patient, each nucleic acid molecule comprising (or consisting of or consisting essentially of) between A and B nucleotides in length, said plurality of nucleic acid molecules comprising (e.g., having nucleotide sequences that together comprise) one or more exons of a plurality of genes consisting of between W and X genes, and said plurality of genes comprising at least two genes in any of Panels A-Q; and (2) determining the sequence of said plurality of nucleic acid molecules.

[0018] In another aspect the present invention provides a method for determining whether a patient has an increased risk of cancer, which comprises: (1) determining whether the patient has a germline deficiency in any of a plurality of genes consisting of between W and X genes, said plurality of genes comprising at least two genes in any of Panels A-Q; and either (2)(a) correlating a germline deficiency in any of said plurality of genes to an increased risk (e.g., increased hereditary risk) of cancer, or (2)(b) correlating the absence of a germline deficiency in all of said plurality of genes to no increased risk (e.g., no increased hereditary risk) of cancer. In some embodiments of this aspect, the method also comprises (a) isolating a plurality of nucleic acid molecules from a sample taken from a patient, each nucleic acid molecule comprising (or consisting of or consisting essentially of) between A and B nucleotides in length, and said plurality of nucleic acid molecules comprising (e.g., having nucleotide sequences that together comprise) one or more exons of said plurality of genes and (b) determining the sequence of said plurality of nucleic acid molecules. In some embodiments, the method comprises detecting a germline deficiency in a gene by comparing the sequence determined in (b) with one or more reference sequences, as discussed in more detail below.

[0019] Thus, the invention provides a method treating a patient comprising (1) determining whether the patient has a germline deficiency in any of a plurality of genes consisting of between W and X genes, said plurality of genes comprising at least two genes in any of Panels A-Q; and (2)(a) correlating a germline deficiency in any of said plurality of genes to an increased risk (e.g., increased hereditary risk) of cancer (e.g., a particular cancer), or (2)(b) correlating the absence of a germline deficiency in all of said plurality of genes to no increased risk (e.g., no increased hereditary risk) of cancer; and (3) recommending, prescribing, or administering a treatment to reduce the patient's risk of cancer. In some embodiments, the treatment comprises removing all or part of the organ in which the patient has an increased risk of cancer (e.g., mastectomy, salpingo-oophorectomy, hysterectomy, colectomy, prostatectomy, etc.). In some embodiments the treatment comprises preventive drug treatments (e.g., tamoxifen treatment in patients with increased risk of breast or ovarian cancer).

[0020] Another aspect of the present invention provides computer program products comprising a computer-usable medium having computer-readable program codes or instructions embodied thereon for enabling a processor to carry out the methods of the invention. A related aspect of the present invention provides a system for determining whether a patient has increased likelihood of response to a particular treatment regimen. Generally speaking, the system comprises (1) computer program for receiving, storing, and/or retrieving a patient's sequence data for a plurality of genes consisting of between W and X genes, said plurality of genes comprising at least two genes in any of Panels A-Q; (2) computer program for querying this patient data; (3) optionally a computer program for comparing the patient's sequence data to one or more reference sequences to determine whether there is a mutation; (4) computer program for concluding whether there is an increased likelihood of cancer based on the presence or absence of a mutation; and optionally (4) computer program for outputting/displaying this conclusion. In some embodiments this program for outputting the conclusion may comprise a computer program for informing a health care professional of the conclusion.

[0021] In another aspect the invention provides a system for sequencing genes in a sample (e.g., tumor sample), comprising: (1) a sample analyzer for sequencing a plurality of genes consisting of between W and X genes, said plurality of genes comprising at least two genes in any of Panels A-Q, wherein the sample analyzer contains (a) the sample which is from a patient, (b) genomic DNA from the sample, (c) transcript RNA from the sample, or (d) DNA synthesized from said genomic DNA; (2) a first computer program for receiving test sequence data on the plurality of genes; and (3) a second computer program for comparing the sequence data to one or more reference sequences. In some embodiments the system comprises a computer program for determining (including quantifying) the patient's degree of risk of cancer based at least in part on the comparison of the test sequence with said one or more reference sequences. Such program may also compare the patient's determined probability of a particular cancer with a reference probability to determine whether the patient has an increased risk of such cancer.

[0022] In another aspect the invention provides methods combining the genetic analysis as described above with analysis of other cancer risk factors, e.g., a patient's family and/or personal history of cancer. In some embodiments the invention provides a method for determining a patient's risk of cancer, which comprises: (1)(a) determining whether the patient has a germline deficiency in any of a plurality of genes consisting of between W and X genes, said plurality of genes comprising at least two genes in any of Panels A-Q and (1)(b) assigning a first risk level of cancer (e.g., percentage probability of developing cancer (any cancer or a specific cancer or set of cancers) by a certain age) for the patient based on the presence or absence of such germline deficiency; (2)(a) evaluating the patient's personal and family history risk factors for cancer and (2)(b) assigning a second risk level of cancer for the patient based on the risk factors identified in (2)(a); and either (3)(a) assigning (optionally communicating and/or recording) the higher of the first and second risk levels determined in (1)(b) and (2)(b) to the patient, or (3)(b) assigning (optionally communicating and/or recording) a third risk level of cancer to the patient, wherein the third risk level is a combination of the first and second risk levels determined in (1)(b) and (2)(b). In some embodiments, the first and second risk levels are given approximately the same weight (e.g., within 5% or 10%) in assigning the third risk level. In some embodiments the ratio of the weight given to the first level to the weight given to the second risk level is approximately 1:2, 1:3, 1:4, 1:5, 1:6, 1:7, 1:8, 1:9, 1:10, 2:1, 3:1, 4:1, 5:1, 6:1, 7:1, 8:1, 9:1, 10:1, 2:3, 3:4, 4:5, 5:6, 6:7, 7:8, 8:9, 9:10, 10:11, 3:2, 4:3, 5:4, 6:5, 7:6, 8:7, 9:8, 10:9, 11:10, 3:5, 5:7, 7:9, 9:11, 11:9, 9:7, 7:5, or 5:3. In some embodiments, both the first risk level and the second risk level are communicated (e.g., to the healthcare provider, to the patient, etc.). Personal risk factors may include cancer diagnosis (including age at diagnosis), multiple primary cancers, triple negative breast cancer, ovarian cancer, smoking, age of menopause, age of menarche, positive biopsy, positive pap smear, male breast cancer, enlarged prostate, colon polyps, etc. Family risk factors can include a relative (e.g., first or second degree) with early onset (e.g., before 40, 50, or 60 years of age) cancer, particular ancestries (e.g., Ashkenazi Jewish ancestry), relative with multiple primary cancers, relative with male breast cancer, relative with ovarian cancer, relative with triple negative breast cancer, etc.

[0023] In another aspect the invention provides compositions for use in the above methods. Such compositions include, but are not limited to: (a) nucleic acid probes hybridizing to a plurality of nucleic acid molecules comprising (e.g., having nucleotide sequences that together comprise) one or more exons of a plurality of genes consisting of between W and X genes, and said plurality of genes comprising at least two genes in any of Panels A-Q; (b) nucleic acid primers and primer pairs suitable for seletively amplifying nucleic acids of (a); (c) antibodies binding immunologically to polypeptides encoded by a plurality of genes consisting of between W and X genes, and said plurality of genes comprising at least two genes in any of Panels A-Q; (d) a probe set comprising (a), (b) and/or (c); (e) a microarray comprising (a), (b), (c), and/or (d).

[0024] In another aspect the present invention provides a kit comprising: reagents for sequencing nucleic acid molecules comprising one or more exons of a plurality of genes comprising a plurality of genes consisting of between W and X genes, said plurality of genes comprising at least two genes in any of Panels A-Q; and instructions for using said reagents. In some embodiments the kit comprises (a), (b), (c), (d), and/or (e) in the preceding paragraph. In some embodiments the reagents are PCR primers specific for the plurality of genes. In some embodiments, the reagents are PCR primers specific for the exons (and optionally some certain amount of adjacent intron) of the plurality of genes (optionally also including polymerase enzyme, deoxynucleotides, buffers, etc.). In some embodiments, the reagents are oligonucleotide probes specific for the exons (and optionally some certain amount of adjacent intron) of the plurality of genes. In some embodiments the reagents (e.g., the primers and/or probes) are packaged into an array (e.g., affixed to a solid support, contained within a reaction volume, etc.).

[0025] Several aspects of the invention described herein involve a step of correlating a particular assay or analysis result or output (e.g., presence or absence of a germline deficiency in one or more genes of Panel B) to some likelihood (e.g., increased, not increased, decreased, etc.) of some clinical feature (e.g., increased risk (e.g., increased hereditary risk) of cancer). Throughout this document, wherever such an aspect is described, an alternative aspect of the invention may involve, in addition to or instead of a correlating step, one or both of the following steps: (a) concluding that the patient has or does not have the clinical feature based at least in part on the assay or analysis result; or (b) communicating that the patient has or does not have the clinical feature based at least in part on the assay or analysis result.

[0026] By way of illustration, but not limitation, one aspect described in this document is a method for determining whether a patient has an increased risk of cancer, which comprises: (1) determining whether the patient has a germline deficiency in any of a plurality of genes consisting of between W and X genes, said plurality of genes comprising at least two genes in any of Panels A-Q; and either (2)(a) correlating a germline deficiency in any of said plurality of genes to an increased risk (e.g., increased hereditary risk) of cancer, or (2)(b) correlating the absence of a germline deficiency in all of said plurality of genes to no increased risk (e.g., no increased hereditary risk) of cancer (or to no identified increased risk due to the tested genes). According to the preceding paragraph, this description of this aspect is understood to include a description of two alternative related aspects. One such embodiment provides a method for determining whether a patient has an increased risk of cancer, which comprises: (1) determining whether the patient has a germline deficiency in any of a plurality of genes consisting of between W and X genes, said plurality of genes comprising at least two test genes in any of Panels A-Q; and either (2)(a) concluding the patient an increased risk (e.g., increased hereditary risk) of cancer based at least in part on the presence of a germline deficiency in any of said plurality of genes (or in any of said test genes); or (2)(b) concluding the patient does not have an increased risk (e.g., no increased hereditary risk) of cancer based at least in part on the absence of a germline deficiency in each of said plurality of genes (or in each of said test genes) (or alternatively concluding the patient has no identified increased risk due to the tested genes). Another such embodiment provides a method for determining whether a patient has an increased risk of cancer, which comprises: (1) determining whether the patient has a germline deficiency in any of a plurality of genes consisting of between W and X genes, said plurality of genes comprising at least two test genes in any of Panels A-Q; and either (2)(a) communicating (e.g., reporting) that the patient an increased risk (e.g., increased hereditary risk) of cancer based at least in part on the presence of a germline deficiency in any of said plurality of genes (or in any of said test genes); or (2)(b) communicating (e.g., reporting) that the patient does not have an increased risk (e.g., no increased hereditary risk) of cancer based at least in part on the absence of a germline deficiency in each of said plurality of genes (or in each of said test genes) (or alternatively communicating that the patient has no identified increased risk due to the tested genes).

[0027] In each embodiment described in this document involving correlating a particular assay or analysis result or output (e.g., presence or absence of a germline deficiency in one or more genes of Panel B) to some likelihood (e.g., increased, not increased, decreased, etc.) of some clinical feature (e.g., increased risk (e.g., increased hereditary risk) of cancer), or additionally or alternatively concluding or communicating such clinical feature based at least in part on such particular assay or analysis result, such correlating, concluding or communicating may comprise assigning a risk or likelihood of the clinical feature occurring based at least in part on the particular assay or analysis result. In some embodiments, such risk is a percentage probability of the event or outcome occurring. In some embodiments, the patient is assigned to a risk group (e.g., low risk, intermediate risk, high risk, etc.). In some embodiments “low risk” is any percentage probability below 5%, 10%, 15%, 20%, 25%, 30%, 35%, 40%, 45%, or 50%. In some embodiments “intermediate risk” is any percentage probability above 5%, 10%, 15%, 20%, 25%, 30%, 35%, 40%, 45%, or 50% and below 15%, 20%, 25%, 30%, 35%, 40%, 45%, 50%, 55%, 60%, 65%, 70%, or 75%. In some embodiments “high risk” is any percentage probability above 25%, 30%, 35%, 40%, 45%, 50%, 55%, 60%, 65%, 70%, 75%, 80%, 85%, 90%, 95%, or 99%.

[0028] As used herein, “communicating” a particular piece of information means to make such information known to another person or transfer such information to a thing (e.g., a computer). In some methods of the invention, a patient's qualitative or quantitative risk of cancer (e.g., a specific cancer or syndrome listed in Table 4) is communicated. In some embodiments, the information used to arrive at such a risk prediction (e.g., presence or absence of germline deficiency in one or more genes in Panel B) is communicated. This communication may be auditory (e.g., verbal), visual (e.g., written), electronic (e.g., data transferred from one computer system to another), etc. In some embodiments, communicating a cancer risk (e.g., “increased”, “not increased”, “up to X %”, etc.) comprises generating a report that communicates the risk. In some embodiments the report is a paper report, an auditory report, or an electronic record. In some embodiments the report is displayed and/or stored on a computing device (e.g., handheld device, desktop computer, smart device, website, etc.). In some embodiments the cancer risk is communicated to a physician (e.g., a report communicating the risk is provided to the physician). In some embodiments the cancer risk is communicated to a patient (e.g., a report communicating the risk is provided to the patient). Communicating a cancer risk can also be accomplished by transferring information (e.g., data) embodying the risk to a server computer and allowing an intermediary or end-user to access such information (e.g., by viewing the information as displayed from the server, by downloading the information in the form of one or more files transferred from the server to the intermediary or end-user's device, etc.).

[0029] Wherever an embodiment of the invention comprises concluding some clinical feature (e.g., increased risk of cancer, etc.), this may include in some embodiments a computer program concluding such feature, typically after performing an algorithm that applies information on germline deficiency in HCGs according to the present invention.

### Embodiments of these Aspects

[0030] Various embodiments of the preceding aspects of the invention are provided. Unless otherwise stated, the invention may apply each of these embodiments to each of the preceding aspects.

[0031] In some embodiments, the method or system comprises comparing the sequences determined in an earlier step or other computer program with one or more reference sequences. In some embodiments, the method comprises correlating a difference between the determined sequences and the one or more reference sequences to a mutation in one or more of the genes in the plurality of genes. In some embodiments the system comprises a computer program for determining whether the patient has a mutation in one or more of the genes in the plurality of genes by determining whether there is a difference between the determined sequences and the one or more reference sequences. In some embodiments the reference sequence for any given gene in the panel is any of the sequences corresponding to that gene as shown in Table 3 below:

TABLE 3

| SEQ | Entrez | | Transcript Variant |
|---|---|---|---|
| ID | Gene | RefSeq Accession | or Exon Coordi- |
| NO | Symbol | # | nates in SEQ ID |
| 1 | APC | NM_001127511.2 | trans-var-1 |
| 2 | APC | NM_001127510.2 | trans-var-2 |
| 3 | APC | NM_000038.5 | trans-var-3 |
| 4 | APC | | |
| 5 | APC | Exon 1 | 501-878 |
| 6 | APC | Exon 2 | 501-585 |
| 7 | APC | Exon 3 | 501-702 |
| 8 | APC | Exon 4 | 501-609 |
| 9 | APC | Exon 5 | 501-614 |
| 10 | APC | Exon 6 | 501-605 |
| 11 | APC | Exon 7 | 501-599 |
| 12 | APC | Exon 8 | 501-879 |
| 13 | APC | Exon 9 | 501-596 |
| 14 | APC | Exon 10 | 501-640 |
| 15 | APC | Exon 11 | 501-578 |
| 16 | APC | Exon 12 | 501-617 |
| 17 | APC | Exon 13 | 501-715 |
| 18 | APC | Exon 14 | 501-9187 |
| 19 | APC | | |
| 20 | ATM | NM_000051.3 | |
| 21 | BARD1 | NM_000465.2 | |
| 22 | BARD1 | | |
| 23 | BARD1 | Exon 1 | 501-793 |
| 24 | BARD1 | Exon 2 | 501-557 |
| 25 | BARD1 | Exon 3 | 501-649 |
| 26 | BARD1 | Exon 4 | 501-1450 |
| 27 | BARD1 | Exon 5 | 501-581 |
| 28 | BARD1 | Exon 6 | 501-673 |
| 29 | BARD1 | Exon 7 | 501-609 |
| 30 | BARD1 | Exon 8 | 501-633 |
| 31 | BARD1 | Exon 9 | 501-593 |
| 32 | BARD1 | Exon 10 | 501-598 |
| 33 | BARD1 | Exon 11 | 501-958 |
| 34 | BARD1 | | |
| 35 | BLM | NM_000057.2 | |
| 36 | BLM | | |
| 37 | BLM | Exon 1 | 501-593 |
| 38 | BLM | Exon 2 | 501-602 |
| 39 | BLM | Exon 3 | 501-1201 |
| 40 | BLM | Exon 4 | 501-660 |
| 41 | BLM | Exon 5 | 501-628 |
| 42 | BLM | Exon 6 | 501-633 |
| 43 | BLM | Exon 7 | 501-1162 |
| 44 | BLM | Exon 8 | 501-692 |
| 45 | BLM | Exon 9 | 501-619 |
| 46 | BLM | Exon 10 | 501-614 |
| 47 | BLM | Exon 11 | 501-599 |
| 48 | BLM | Exon 12 | 501-649 |
| 49 | BLM | Exon 13 | 501-607 |
| 50 | BLM | Exon 14 | 501-661 |
| 51 | BLM | Exon 15 | 501-696 |
| 52 | BLM | Exon 16 | 501-691 |
| 53 | BLM | Exon 17 | 501-648 |
| 54 | BLM | Exon 18 | 501-700 |
| 55 | BLM | Exon 19 | 501-693 |
| 56 | BLM | Exon 20 | 501-623 |
| 57 | BLM | Exon 21 | 501-702 |
| 58 | BLM | Exon 22 | 501-855 |
| 59 | BLM | | |
| 60 | BMPR1A | NM_004329.2 | |
| 61 | BMPR1A | | |
| 62 | BMPR1A | Exon 1 | 501-781 |
| 63 | BMPR1A | Exon 2 | 501-615 |
| 64 | BMPR1A | Exon 3 | 501-719 |
| 65 | BMPR1A | Exon 4 | 501-663 |
| 66 | BMPR1A | Exon 5 | 501-603 |
| 67 | BMPR1A | Exon 6 | 501-597 |
| 68 | BMPR1A | Exon 7 | 501-600 |
| 69 | BMPR1A | Exon 8 | 501-645 |
| 70 | BMPR1A | Exon 9 | 501-693 |
| 71 | BMPR1A | Exon 10 | 501-798 |
| 72 | BMPR1A | Exon 11 | 501-676 |
| 73 | BMPR1A | Exon 12 | 501-631 |
| 74 | BMPR1A | Exon 13 | 501-2095 |
| 75 | BMPR1A | | |
| 76 | BRAF | NM_004333.4 | |
| 77 | BRAF | | |
| 78 | BRAF | Exon 1 | 501-699 |
| 79 | BRAF | Exon 2 | 501-602 |
| 80 | BRAF | Exon 3 | 501-764 |
| 81 | BRAF | Exon 4 | 501-604 |
| 82 | BRAF | Exon 5 | 501-603 |
| 83 | BRAF | Exon 6 | 501-649 |
| 84 | BRAF | Exon 7 | 501-620 |
| 85 | BRAF | Exon 8 | 501-660 |
| 86 | BRAF | Exon 9 | 501-537 |
| 87 | BRAF | Exon 10 | 501-637 |
| 88 | BRAF | Exon 11 | 501-618 |
| 89 | BRAF | Exon 12 | 501-585 |
| 90 | BRAF | Exon 13 | 501-677 |
| 91 | BRAF | Exon 14 | 501-547 |
| 92 | BRAF | Exon 15 | 501-619 |
| 93 | BRAF | Exon 16 | 501-632 |
| 94 | BRAF | Exon 17 | 501-635 |
| 95 | BRAF | Exon 18 | 501-1258 |
| 96 | BRAF | | |
| 97 | BRCA1 | NM_007294.3 | trans-var-1 |
| 98 | BRCA1 | NM_007300.3 | trans-var-2 |
| 99 | BRCA1 | NM_007297.3 | trans-var-3 |
| 100 | BRCA1 | NM_007298.3 | trans-var-4 |
| 101 | BRCA1 | NM_007299.3 | trans-var-5 |
| 102 | BRCA1 | | |
| 103 | BRCA1 | Exon 1 | 501-713 |
| 104 | BRCA1 | Exon 2 | 501-599 |
| 105 | BRCA1 | Exon 3 | 501-554 |
| 106 | BRCA1 | Exon 4 | 501-578 |
| 107 | BRCA1 | Exon 5 | 501-589 |
| 108 | BRCA1 | Exon 6 | 501-640 |
| 109 | BRCA1 | Exon 7 | 501-606 |
| 110 | BRCA1 | Exon 8 | 501-546 |
| 111 | BRCA1 | Exon 9 | 501-577 |
| 112 | BRCA1 | Exon 10 | 501-3926 |
| 113 | BRCA1 | Exon 11 | 501-589 |
| 114 | BRCA1 | Exon 12 | 501-672 |
| 115 | BRCA1 | Exon 13 | 501-566 |
| 116 | BRCA1 | Exon 14 | 501-624 |
| 117 | BRCA1 | Exon 15 | 501-691 |
| 118 | BRCA1 | Exon 16 | 501-811 |
| 119 | BRCA1 | Exon 17 | 501-588 |
| 120 | BRCA1 | Exon 18 | 501-578 |
| 121 | BRCA1 | Exon 19 | 501-541 |
| 122 | BRCA1 | Exon 20 | 501-584 |
| 123 | BRCA1 | Exon 21 | 501-555 |
| 124 | BRCA1 | Exon 22 | 501-574 |
| 125 | BRCA1 | Exon 23 | 501-561 |
| 126 | BRCA1 | Exon 24 | 501-2008 |
| 127 | BRCA1 | | |
| 128 | BRCA2 | NM_000059.3 | |
| 129 | BRCA2 | | |
| 130 | BRCA2 | Exon 1 | 501-688 |
| 131 | BRCA2 | Exon 2 | 501-606 |
| 132 | BRCA2 | Exon 3 | 501-749 |
| 133 | BRCA2 | Exon 4 | 501-609 |
| 134 | BRCA2 | Exon 5 | 501-550 |
| 135 | BRCA2 | Exon 6 | 501-541 |
| 136 | BRCA2 | Exon 7 | 501-615 |
| 137 | BRCA2 | Exon 8 | 501-550 |
| 138 | BRCA2 | Exon 9 | 501-612 |
| 139 | BRCA2 | Exon 10 | 501-1616 |
| 140 | BRCA2 | Exon 11 | 501-5432 |
| 141 | BRCA2 | Exon 12 | 501-596 |
| 142 | BRCA2 | Exon 13 | 501-570 |
| 143 | BRCA2 | Exon 14 | 501-928 |
| 144 | BRCA2 | Exon 15 | 501-682 |
| 145 | BRCA2 | Exon 16 | 501-688 |
| 146 | BRCA2 | Exon 17 | 501-671 |
| 147 | BRCA2 | Exon 18 | 501-855 |
| 148 | BRCA2 | Exon 19 | 501-656 |
| 149 | BRCA2 | Exon 20 | 501-645 |
| 150 | BRCA2 | Exon 21 | 501-622 |
| 151 | BRCA2 | Exon 22 | 501-699 |
| 152 | BRCA2 | Exon 23 | 501-664 |
| 153 | BRCA2 | Exon 24 | 501-639 |
| 154 | BRCA2 | Exon 25 | 501-745 |
| 155 | BRCA2 | Exon 26 | 501-647 |
| 156 | BRCA2 | Exon 27 | 501-2011 |
| 157 | BRCA2 | | |
| 158 | BRIP1 | NM_032043.2 | |
| 159 | BRIP1 | NM_032043.2 | |
| 160 | BRIP1 | | |
| 161 | BRIP1 | Exon 1 | 501-776 |
| 162 | BRIP1 | Exon 2 | 501-623 |
| 163 | BRIP1 | Exon 3 | 501-612 |
| 164 | BRIP1 | Exon 4 | 501-674 |
| 165 | BRIP1 | Exon 5 | 501-628 |
| 166 | BRIP1 | Exon 6 | 501-620 |
| 167 | BRIP1 | Exon 7 | 501-791 |
| 168 | BRIP1 | Exon 8 | 501-722 |
| 169 | BRIP1 | Exon 9 | 501-700 |
| 170 | BRIP1 | Exon 10 | 501-633 |
| 171 | BRIP1 | Exon 11 | 501-655 |
| 172 | BRIP1 | Exon 12 | 501-666 |
| 173 | BRIP1 | Exon 13 | 501-641 |
| 174 | BRIP1 | Exon 14 | 501-662 |
| 175 | BRIP1 | Exon 15 | 501-660 |
| 176 | BRIP1 | Exon 16 | 501-622 |
| 177 | BRIP1 | Exon 17 | 501-613 |
| 178 | BRIP1 | Exon 18 | 501-583 |
| 179 | BRIP1 | Exon 19 | 501-830 |
| 180 | BRIP1 | Exon 20 | 501-5455 |
| 181 | BRIP1 | | |
| 182 | CDH1 | NM_004360.3 | |
| 183 | CDH1 | | |
| 184 | CDH1 | Exon 1 | 501-672 |
| 185 | CDH1 | Exon 2 | 501-615 |
| 186 | CDH1 | Exon 3 | 501-724 |
| 187 | CDH1 | Exon 4 | 501-644 |
| 188 | CDH1 | Exon 5 | 501-656 |
| 189 | CDH1 | Exon 6 | 501-645 |
| 190 | CDH1 | Exon 7 | 501-676 |
| 191 | CDH1 | Exon 8 | 501-629 |
| 192 | CDH1 | Exon 9 | 501-683 |
| 193 | CDH1 | Exon 10 | 501-745 |
| 194 | CDH1 | Exon 11 | 501-646 |
| 195 | CDH1 | Exon 12 | 501-725 |
| 196 | CDH1 | Exon 13 | 501-728 |
| 197 | CDH1 | Exon 14 | 501-631 |
| 198 | CDH1 | Exon 15 | 501-644 |
| 199 | CDH1 | Exon 16 | 501-2752 |
| 200 | CDH1 | | |
| 201 | CDK4 | NM_000075.3 | |
| 202 | CDK4 | | |
| 203 | CDK4 | Exon 1 | 501-773 |
| 204 | CDK4 | Exon 2 | 501-737 |
| 205 | CDK4 | Exon 3 | 501-636 |
| 206 | CDK4 | Exon 4 | 501-668 |
| 207 | CDK4 | Exon 5 | 501-610 |
| 208 | CDK4 | Exon 6 | 501-551 |
| 209 | CDK4 | Exon 7 | 501-636 |
| 210 | CDK4 | Exon 8 | 501-1391 |
| 211 | CDK4 | | |
| 212 | CDKN2A | NM_000077.4 | trans-var-1 |
| 213 | CDKN2A | NM_058197.4 | trans-var-3 |
| 214 | CDKN2A | NM_058195.3 | trans-var-4 |
| 215 | CDKN2A | NM_001195132.1 | trans-var-5 |
| 216 | CDKN2A | | |
| 217 | CDKN2A | Exon 1 | 501-956 |
| 218 | CDKN2A | Exon 2 | 501-807 |
| 219 | CDKN2A | Exon 3 | 501-697 |
| 220 | CDKN2A | Exon 4 | 501-991 |
| 221 | CDKN2A | | |
| 222 | CEBPA | NM_004364.3 | |
| 223 | CHEK2 | NM_007194.3 | trans-var-1 |
| 224 | CHEK2 | NM_145862.2 | trans-var-2 |
| 225 | CHEK2 | NM_001005735.1 | trans-var-3 |
| 226 | CHEK2 | | |
| 227 | CHEK2 | Exon 1 | 501-566 |
| 228 | CHEK2 | Exon 2 | 501-825 |
| 229 | CHEK2 | Exon 3 | 501-629 |
| 230 | CHEK2 | Exon 4 | 501-625 |
| 231 | CHEK2 | Exon 5 | 501-648 |
| 232 | CHEK2 | Exon 6 | 501-591 |
| 233 | CHEK2 | Exon 7 | 501-609 |
| 234 | CHEK2 | Exon 8 | 501-554 |
| 235 | CHEK2 | Exon 9 | 501-562 |
| 236 | CHEK2 | Exon 10 | 501-600 |
| 237 | CHEK2 | Exon 11 | 501-587 |
| 238 | CHEK2 | Exon 12 | 501-664 |
| 239 | CHEK2 | Exon 13 | 501-616 |
| 240 | CHEK2 | Exon 14 | 501-586 |
| 241 | CHEK2 | Exon 15 | 501-581 |
| 242 | CHEK2 | Exon 16 | 501-744 |
| 243 | CHEK2 | | |
| 244 | EPCAM | NM_002354.2 | |
| 245 | EPCAM | | |
| 246 | EPCAM | Exon 1 | 501-934 |
| 247 | EPCAM | Exon 2 | 501-608 |
| 248 | EPCAM | Exon 3 | 501-741 |
| 249 | EPCAM | Exon 4 | 501-566 |
| 250 | EPCAM | Exon 5 | 501-564 |
| 251 | EPCAM | Exon 6 | 501-602 |
| 252 | EPCAM | Exon 7 | 501-701 |
| 253 | EPCAM | Exon 8 | 501-545 |
| 254 | EPCAM | Exon 9 | 501-957 |
| 255 | EPCAM | | |
| 256 | FANCA | NM_000135.2 | trans-var-1 |
| 257 | FANCA | NM_001018112.1 | trans-var-2 |
| 258 | FANCB | NM_001018113.1 | trans-var-1 |
| 259 | FANCB | NM_152633.2 | trans-var-2 |
| 260 | FANCC | NM_000136.2 | trans-var-1 |
| 261 | FANCC | NM_001243743.1 | trans-var-2 |
| 262 | FANCC | NM_001243744.1 | trans-var-3 |
| 263 | FANCD2 | NM_033084.3 | trans-var-1 |
| 264 | FANCD2 | NM_001018115.1 | trans-var-2 |
| 265 | FANCE | NM_021922.2 | |
| 266 | FANCF | NM_022725.3 | |
| 267 | FANCG | NM_004629.1 | |
| 268 | FANCI | NM_001113378.1 | trans-var-1 |
| 269 | FANCI | NM_018193.2 | trans-var-2 |
| 270 | FANCL | NM_001114636.1 | trans-var-1 |
| 271 | FANCL | NM_018062.3 | trans-var-2 |
| 272 | FANCM | NM_020937.2 | |
| 273 | FLCN | NM_144997.5 | trans-var-1 |
| 274 | FLCN | NM_144606.5 | trans-var-2 |
| 275 | HOXB13 | NM_006361.5 | |
| 276 | HOXB13 | | |
| 277 | HOXB13 | Exon 1 | 501-1257 |
| 278 | HOXB13 | Exon 2 | 501-2779 |
| 279 | HOXB13 | | |
| 280 | KRAS | NM_033360.2 | trans-var-a |
| 281 | KRAS | NM_004985.3 | trans-var-b |
| 282 | MEN1 | NM_000244.3 | trans-var-1 |
| 283 | MEN1 | NM_130799.2 | trans-var-2 |
| 284 | MEN1 | NM_130800.2 | trans-var-e1B |
| 285 | MEN1 | NM_130801.2 | trans-var-e1C |
| 286 | MEN1 | NM_130802.2 | trans-var-e1D |
| 287 | MEN1 | NM_130803.2 | trans-var-e1E |
| 288 | MEN1 | NM_130804.2 | trans-var-e1F1 |
| 289 | MLH1 | NM_000249.3 | trans-var-1 |
| 290 | MLH1 | NM_001167617.1 | trans-var-2 |
| 291 | MLH1 | NM_001167618.1 | trans-var-3 |
| 292 | MLH1 | NM_001167619.1 | trans-var-4 |
| 293 | MLH1 | | |
| 294 | MLH1 | Exon 1 | 501-814 |
| 295 | MLH1 | Exon 2 | 501-591 |
| 296 | MLH1 | Exon 3 | 501-599 |
| 297 | MLH1 | Exon 4 | 501-574 |
| 298 | MLH1 | Exon 5 | 501-573 |
| 299 | MLH1 | Exon 6 | 501-592 |
| 300 | MLH1 | Exon 7 | 501-543 |
| 301 | MLH1 | Exon 8 | 501-589 |
| 302 | MLH1 | Exon 9 | 501-613 |
| 303 | MLH1 | Exon 10 | 501-594 |
| 304 | MLH1 | Exon 11 | 501-654 |
| 305 | MLH1 | Exon 12 | 501-871 |
| 306 | MLH1 | Exon 13 | 501-649 |
| 307 | MLH1 | Exon 14 | 501-609 |
| 308 | MLH1 | Exon 15 | 501-564 |
| 309 | MLH1 | Exon 16 | 501-665 |
| 310 | MLH1 | Exon 17 | 501-593 |
| 311 | MLH1 | Exon 18 | 501-614 |
| 312 | MLH1 | Exon 19 | 501-861 |
| 313 | MLH1 | | |
| 314 | MLH3 | NM_001040108.1 | trans-var-1 |
| 315 | MLH3 | NM_014381.2 | trans-var-2 |
| 316 | MLH3 | | |
| 317 | MLH3 | Exon 1 | 501-653 |
| 318 | MLH3 | Exon 2 | 501-3843 |
| 319 | MLH3 | Exon 3 | 501-599 |
| 320 | MLH3 | Exon 4 | 501-586 |
| 321 | MLH3 | Exon 5 | 501-605 |
| 322 | MLH3 | Exon 6 | 501-573 |
| 323 | MLH3 | Exon 7 | 501-572 |
| 324 | MLH3 | Exon 8 | 501-612 |
| 325 | MLH3 | Exon 9 | 501-660 |
| 326 | MLH3 | Exon 10 | 501-524 |
| 327 | MLH3 | Exon 11 | 501-579 |
| 328 | MLH3 | Exon 12 | 501-652 |
| 329 | MLH3 | Exon 13 | 501-3938 |
| 330 | MLH3 | | |
| 331 | MRE11A | NM_005591.3 | trans-var-1 |
| 332 | MRE11A | NM_005590.3 | trans-var-2 |
| 333 | MRE11A | | |
| 334 | MRE11A | Exon 1 | 501-584 |
| 335 | MRE11A | Exon 2 | 501-625 |
| 336 | MRE11A | Exon 3 | 501-633 |
| 337 | MRE11A | Exon 4 | 501-661 |
| 338 | MRE11A | Exon 5 | 501-588 |
| 339 | MRE11A | Exon 6 | 501-642 |
| 340 | MRE11A | Exon 7 | 501-615 |
| 341 | MRE11A | Exon 8 | 501-686 |
| 342 | MRE11A | Exon 9 | 501-672 |
| 343 | MRE11A | Exon 10 | 501-581 |
| 344 | MRE11A | Exon 11 | 501-627 |
| 345 | MRE11A | Exon 12 | 501-601 |
| 346 | MRE11A | Exon 13 | 501-674 |
| 347 | MRE11A | Exon 14 | 501-563 |
| 348 | MRE11A | Exon 15 | 501-720 |
| 349 | MRE11A | Exon 16 | 501-584 |
| 350 | MRE11A | Exon 17 | 501-559 |
| 351 | MRE11A | Exon 18 | 501-568 |
| 352 | MRE11A | Exon 19 | 501-576 |
| 353 | MRE11A | Exon 20 | 501-3379 |
| 354 | MRE11A | | |
| 355 | MSH2 | NM_000251.1 | |
| 356 | MSH2 | | |
| 357 | MSH2 | Exon 1 | 501-779 |
| 358 | MSH2 | Exon 2 | 501-655 |
| 359 | MSH2 | Exon 3 | 501-779 |
| 360 | MSH2 | Exon 4 | 501-647 |
| 361 | MSH2 | Exon 5 | 501-650 |
| 362 | MSH2 | Exon 6 | 501-634 |
| 363 | MSH2 | Exon 7 | 501-700 |
| 364 | MSH2 | Exon 8 | 501-610 |
| 365 | MSH2 | Exon 9 | 501-624 |
| 366 | MSH2 | Exon 10 | 501-651 |
| 367 | MSH2 | Exon 11 | 501-598 |
| 368 | MSH2 | Exon 12 | 501-746 |
| 369 | MSH2 | Exon 13 | 501-705 |
| 370 | MSH2 | Exon 14 | 501-748 |
| 371 | MSH2 | Exon 15 | 501-676 |
| 372 | MSH2 | Exon 16 | 501-943 |
| 373 | MSH2 | | |
| 374 | MSH6 | NM_000179.2 | |
| 375 | MSH6 | | |
| 376 | MSH6 | Exon 1 | 501-912 |
| 377 | MSH6 | Exon 2 | 501-697 |
| 378 | MSH6 | Exon 3 | 501-670 |
| 379 | MSH6 | Exon 4 | 501-3045 |
| 380 | MSH6 | Exon 5 | 501-766 |
| 381 | MSH6 | Exon 6 | 501-618 |
| 382 | MSH6 | Exon 7 | 501-590 |
| 383 | MSH6 | Exon 8 | 501-654 |
| 384 | MSH6 | Exon 9 | 501-700 |
| 385 | MSH6 | Exon 10 | 501-675 |
| 386 | MSH6 | | |
| 387 | MUTYH | NM_012222.2 | trans-var- |
| | | | alpha1 |
| 388 | MUTYH | NM_001048171.1 | trans-var- |
| | | | alpha3 |
| 389 | MUTYH | NM_001128425.1 | trans-var- |
| | | | alpha5 |
| 390 | MUTYH | NM_001048174.1 | trans-var- |
| | | | beta3 |
| 391 | MUTYH | NM_001048172.1 | trans-var- |
| | | | gamma2 |
| 392 | MUTYH | NM_001048173.1 | trans-var- |
| | | | gamma3 |
| 393 | MUTHY | | |
| 394 | MUTHY | Exon 1 | 501-752 |
| 395 | MUTHY | Exon 2 | 501-621 |
| 396 | MUTHY | Exon 3 | 501-691 |
| 397 | MUTHY | Exon 4 | 501-540 |
| 398 | MUTHY | Exon 5 | 501-574 |
| 399 | MUTHY | Exon 6 | 501-542 |
| 400 | MUTHY | Exon 7 | 501-572 |
| 401 | MUTHY | Exon 8 | 501-614 |
| 402 | MUTHY | Exon 9 | 501-598 |
| 403 | MUTHY | Exon 10 | 501-645 |
| 404 | MUTHY | Exon 11 | 501-564 |
| 405 | MUTHY | Exon 12 | 501-689 |
| 406 | MUTHY | Exon 13 | 501-637 |
| 407 | MUTHY | Exon 14 | 501-653 |
| 408 | MUTHY | Exon 15 | 501-542 |
| 409 | MUTHY | Exon 16 | 501-696 |
| 410 | MUTHY | | |
| 411 | NBN | NM_002485.4 | |
| 412 | NBN | | |
| 413 | NBN | Exon 1 | 501-647 |
| 414 | NBN | Exon 2 | 501-634 |
| 415 | NBN | Exon 3 | 501-649 |
| 416 | NBN | Exon 4 | 501-660 |
| 417 | NBN | Exon 5 | 501-604 |
| 418 | NBN | Exon 6 | 501-618 |
| 419 | NBN | Exon 7 | 501-694 |
| 420 | NBN | Exon 8 | 501-598 |
| 421 | NBN | Exon 9 | 501-630 |
| 422 | NBN | Exon 10 | 501-773 |
| 423 | NBN | Exon 11 | 501-948 |
| 424 | NBN | Exon 12 | 501-569 |
| 425 | NBN | Exon 13 | 501-656 |
| 426 | NBN | Exon 14 | 501-614 |
| 427 | NBN | Exon 15 | 501-550 |
| 428 | NBN | Exon 16 | 501-2777 |
| 429 | NBN | | |
| 430 | PALB2 | NM_024675.3 | |
| 431 | PALB2 | | |
| 432 | PALB2 | Exon 1 | 501-748 |
| 433 | PALB2 | Exon 2 | 501-560 |
| 434 | PALB2 | Exon 3 | 501-603 |
| 435 | PALB2 | Exon 4 | 501-1973 |
| 436 | PALB2 | Exon 5 | 501-1330 |
| 437 | PALB2 | Exon 6 | 501-572 |
| 438 | PALB2 | Exon 7 | 501-662 |
| 439 | PALB2 | Exon 8 | 501-586 |
| 440 | PALB2 | Exon 9 | 501-662 |
| 441 | PALB2 | Exon 10 | 501-617 |
| 442 | PALB2 | Exon 11 | 501-588 |
| 443 | PALB2 | Exon 12 | 501-649 |
| 444 | PALB2 | Exon 13 | 501-1008 |
| 445 | PALB2 | | |
| 446 | PIK3CA | NM_006218.2 | |
| 447 | PMS1 | NM_000534.4 | trans-var-1 |
| 448 | PMS1 | NM_001128143.1 | trans-var-2 |
| 449 | PMS1 | NM_001128144.1 | trans-var-3 |
| 450 | PMS2 | NM_000535.5 | |
| 451 | PMS2 | | |
| 452 | PMS2 | Exon 1 | 501-610 |
| 453 | PMS2 | Exon 2 | 501-640 |
| 454 | PMS2 | Exon 3 | 501-587 |
| 455 | PMS2 | Exon 4 | 501-603 |
| 456 | PMS2 | Exon 5 | 501-684 |
| 457 | PMS2 | Exon 6 | 501-668 |
| 458 | PMS2 | Exon 7 | 501-598 |
| 459 | PMS2 | Exon 8 | 501-600 |
| 460 | PMS2 | Exon 9 | 501-585 |
| 461 | PMS2 | Exon 10 | 501-656 |
| 462 | PMS2 | Exon 11 | 501-1362 |
| 463 | PMS2 | Exon 12 | 501-668 |
| 464 | PMS2 | Exon 13 | 501-601 |
| 465 | PMS2 | Exon 14 | 501-670 |
| 466 | PMS2 | Exon 15 | 501-804 |
| 467 | PMS2 | | |
| 468 | PTCH1 | NM_001083602.1 | trans-var-1a |
| 469 | PTCH1 | NM_001083603.1 | trans-var-1a′ |
| 470 | PTCH1 | NM_000264.3 | trans-var-1b |
| 471 | PTCH1 | NM_001083604.1 | trans-var-1c |
| 472 | PTCH1 | NM_001083605.1 | trans-var-1c′ |
| 473 | PTCH1 | NM_001083606.1 | trans-var-1d |
| 474 | PTCH1 | NM_001083607.1 | trans-var-1e |
| 475 | PTEN | NM_000314.4 | |
| 476 | PTEN | | |
| 477 | PTEN | Exon 1 | 501-1611 |
| 478 | PTEN | Exon 2 | 501-585 |
| 479 | PTEN | Exon 3 | 501-545 |
| 480 | PTEN | Exon 4 | 501-544 |
| 481 | PTEN | Exon 5 | 501-739 |
| 482 | PTEN | Exon 6 | 501-642 |
| 483 | PTEN | Exon 7 | 501-667 |
| 484 | PTEN | Exon 8 | 501-725 |
| 485 | PTEN | Exon 9 | 501-3989 |
| 486 | PTEN | | |
| 487 | RAD50 | NM_005732.3 | |
| 488 | RAD50 | | |
| 489 | RAD50 | Exon 1 | 501-1030 |
| 490 | RAD50 | Exon 2 | 501-584 |
| 491 | RAD50 | Exon 3 | 501-651 |
| 492 | RAD50 | Exon 4 | 501-686 |
| 493 | RAD50 | Exon 5 | 501-705 |
| 494 | RAD50 | Exon 6 | 501-629 |
| 495 | RAD50 | Exon 7 | 501-666 |
| 496 | RAD50 | Exon 8 | 501-694 |
| 497 | RAD50 | Exon 9 | 501-707 |
| 498 | RAD50 | Exon 10 | 501-683 |
| 499 | RAD50 | Exon 11 | 501-685 |
| 500 | RAD50 | Exon 12 | 501-676 |
| 501 | RAD50 | Exon 13 | 501-738 |
| 502 | RAD50 | Exon 14 | 501-690 |
| 503 | RAD50 | Exon 15 | 501-627 |
| 504 | RAD50 | Exon 16 | 501-694 |
| 505 | RAD50 | Exon 17 | 501-611 |
| 506 | RAD50 | Exon 18 | 501-593 |
| 507 | RAD50 | Exon 19 | 501-614 |
| 508 | RAD50 | Exon 20 | 501-628 |
| 509 | RAD50 | Exon 21 | 501-725 |
| 510 | RAD50 | Exon 22 | 501-586 |
| 511 | RAD50 | Exon 23 | 501-643 |
| 512 | RAD50 | Exon 24 | 501-634 |
| 513 | RAD50 | Exon 25 | 501-2944 |
| 514 | RAD50 | | |
| 515 | RAD51C | NM_058216.1 | trans-var-1 |
| 516 | RAD51C | NM_002876.2 | trans-var-2 |
| 517 | RAD51C | | |
| 518 | RAD51C | Exon 1 | 501-687 |
| 519 | RAD51C | Exon 2 | 501-904 |
| 520 | RAD51C | | |
| 521 | RAD51D | NM_002878.3 | trans-var-1 |
| 522 | RAD51D | NM_133629.2 | trans-var-4 |
| 523 | RAD51D | NM_001142571.1 | trans-var-6 |
| 524 | RAD51D | | |
| 525 | RAD51D | Exon 1 | 501-838 |
| 526 | RAD51D | Exon 2 | 501-562 |
| 527 | RAD51D | Exon 3 | 501-679 |
| 528 | RAD51D | Exon 4 | 501-619 |
| 529 | RAD51D | Exon 5 | 501-582 |
| 530 | RAD51D | Exon 6 | 501-635 |
| 531 | RAD51D | Exon 7 | 501-596 |
| 532 | RAD51D | Exon 8 | 501-591 |
| 533 | RAD51D | Exon 9 | 501-571 |
| 534 | RAD51D | Exon 10 | 501-665 |
| 535 | RAD51D | Exon 11 | 501-1745 |
| 536 | RAD51D | | |
| 537 | RET | NM_020975.4 | trans-var-2 |
| 538 | RET | NM_020630.4 | trans-var-4 |
| 539 | SDHAF2 | NM_017841.2 | |
| 540 | SDHB | NM_003000.2 | |
| 541 | SDHC | NM_003001.3 | trans-var-1 |
| 542 | SDHC | NM_001035511.1 | trans-var-2 |
| 543 | SDHC | NM_001035512.1 | trans-var-3 |
| 544 | SDHC | NM_001035513.1 | trans-var-4 |
| 545 | SDHD | NM_003002.2 | |
| 546 | SMAD4 | NM_005359.5 | |
| 547 | SMAD4 | | |
| 548 | SMAD4 | Exon 1 | 501-911 |
| 549 | SMAD4 | Exon 2 | 501-876 |
| 550 | SMAD4 | Exon 3 | 501-675 |
| 551 | SMAD4 | Exon 4 | 501-530 |
| 552 | SMAD4 | Exon 5 | 501-713 |
| 553 | SMAD4 | Exon 6 | 501-620 |
| 554 | SMAD4 | Exon 7 | 501-617 |
| 555 | SMAD4 | Exon 8 | 501-551 |
| 556 | SMAD4 | Exon 9 | 501-684 |
| 557 | SMAD4 | Exon 10 | 501-669 |
| 558 | SMAD4 | Exon 11 | 501-639 |
| 559 | SMAD4 | Exon 12 | 501-7286 |
| 560 | SMAD4 | | |
| 561 | STK11 | NM_000455.4 | |
| 562 | STK11 | | |
| 563 | STK11 | Exon 1 | 501-1905 |
| 564 | STK11 | Exon 2 | 501-584 |
| 565 | STK11 | Exon 3 | 501-590 |
| 566 | STK11 | Exon 4 | 501-633 |
| 567 | STK11 | Exon 5 | 501-637 |
| 568 | STK11 | Exon 6 | 501-628 |
| 569 | STK11 | Exon 7 | 501-558 |
| 570 | STK11 | Exon 8 | 501-688 |
| 571 | STK11 | Exon 9 | 501-710 |
| 572 | STK11 | Exon 10 | 501-1343 |
| 573 | STK11 | | |
| 574 | TMEM127 | NM_017849.3 | trans-var-1 |
| 575 | TMEM127 | NM_001193304.2 | trans-var-2 |
| 576 | TP53 | NM_000546.4 | trans-var-1 |
| 577 | TP53 | NM_001126112.2 | trans-var-2 |
| 578 | TP53 | NM_001126114.1 | trans-var-3 |
| 579 | TP53 | NM_001126113.1 | trans-var-4 |
| 580 | TP53 | NM_001126115.1 | trans-var-5 |
| 581 | TP53 | NM_001126116.1 | trans-var-6 |
| 582 | TP53 | NM_001126117.1 | trans-var-7 |
| 583 | TP53 | | |
| 584 | TP53 | | |
| 585 | TP53 | Exon 1 | 501-674 |
| 586 | TP53 | Exon 2 | 501-602 |
| 587 | TP53 | Exon 3 | 501-741 |
| 588 | TP53 | Exon 4 | 501-522 |
| 589 | TP53 | Exon 5 | 501-779 |
| 590 | TP53 | Exon 6 | 501-684 |
| 591 | TP53 | Exon 7 | 501-613 |
| 592 | TP53 | Exon 8 | 501-941 |
| 593 | TP53 | Exon 9 | 501-610 |
| 594 | TP53 | Exon 10 | 501-637 |
| 595 | TP53 | Exon 11 | 501-574 |
| 596 | TP53 | Exon 12 | 501-607 |
| 597 | TP53 | Exon 13 | 501-560 |
| 598 | TP53 | Exon 14 | 501-633 |
| 599 | TP53 | Exon 15 | 501-1789 |
| 600 | TP53 | | |
| 601 | VHL | NM_000551.3 | trans-var-1 |
| 602 | VHL | NM_198156.2 | trans-var-2 |

[0032] Table 3 shows how sequence identifiers (i.e., SEQ ID NOs) correspond to different reference sequences useful for the various HCGs in various aspects of the invention. As used in Table 3, “transcript variant” refers to differently spliced transcripts expressed from some genes. In cases where no transcript variant is indicated, this is because NCBI lists only one transcript for the relevant gene. The exon coordinates given in Table 3 indicate where in each relevant sequence the exons are found. The first 500 and last 500 nucleotides of each such sequence are intronic. As used herein, “exon/intron boundary” in one of these sequences means a certain number of nucleotides (e.g., 1, 2, 3, 4, 5, 10, 15, 20, 30, 40, 50, 75, 100 or more) on each side of the transition (e.g., phosphodiester bond) from exon to intron (or from intron to exon) or a portion of the nucleotide sequence of at least a certain length (e.g., 1, 2, 3, 4, 5, 10, 15, 20, 30, 40, 50, 75, 100 or more) comprising the two nucleotides on each side of the transition from exon to intron (or from intron to exon).

[0033] In some embodiments of various aspects of the invention, a nucleic acid of the invention (e.g., in a primer set, in an array, in a kit, etc.) comprises at least 5, 6, 7, 8, 9, 10, 11, 12, 13, 14, 15, 16, 17, 18, 19, 20, 25, 30, 35, 40, 45, 50, 60, 70, 80, 90, or 100 or more nucleotides on each side of such transition. Thus, an oligonucleotide (e.g., primer) according to the invention targeting Exon 3 of the APC gene “comprising 10 nucleotides on each side of the 5′ exon/intron boundary of Exon 3 of the APC gene” would comprise nucleotides 491-510 of SEQ ID NO:7, or the following sequence: 5′-ttttatttagAGCTTAACTT-3′ (with lower case letters indicating intronic sequence and capitalized letters indicating exonic sequence). In some embodiments of various aspects of the invention, a nucleic acid of the invention comprises at least 5, 6, 7, 8, 9, 10, 11, 12, 13, 14, 15, 16, 17, 18, 19, 20, 25, 30, 35, 40, 45, 50, 60, 70, 80, 90, or 100 or more consecutive nucleotides of a nucleotide sequence in a SEQ ID NO including the two nucleotides on each side of such transition. Thus, an oligonucleotide (e.g., primer) according to the invention targeting Exon 3 of the APC gene “comprising 18 consecutive nucleotides of SEQ ID NO:7 including the 5′ exon/intron boundary of Exon 3 of the APC gene” would comprise any 18 consecutive nucleotides between (and including) positions 484 and 517 of SEQ ID NO:7, or any 18 consecutive nucleotides of the following sequence: 5′-gtttctattttatttagAGCTTAACTTAGATAGC-3′ (with lower case letters indicating intronic sequence and capitalized letters indicating exonic sequence). At various places in this document Exon 3 of the APC gene is used as an example to illustrate various embodiments of the invention. Those skilled in the art, based on the knowledge in the art and the present disclosure (especially Table 3), can readily and unambiguously apply each example to any gene, exon, or sequence disclosed herein.

[0034] Germline deficiencies in the genes in Panels A-Q correlate to increased risk of cancer, including particular cancers as summarized in Table 4. Thus, in some embodiments the method of the invention comprises correlating a germline deficiency in any particular gene in the plurality of genes to an increased risk of a particular cancer as shown in Table 4. In some embodiments the method comprises diagnosing the patient with an increased risk of a particular cancer (or a particular syndrome) as shown in Table 4 based at least in part on a germline deficiency in any particular gene in the plurality of genes. In some embodiments the method comprises correlating no germline deficiency in any gene in the plurality of genes to no increased risk of any cancer (or to no identified increased risk due to the tested genes). In some embodiments the system of the invention comprises a computer program for determining (including quantifying) the patient's degree of risk of cancer (e.g., any particular cancer as shown in Table 4) based at least in part on the comparison of the test sequence with said one or more reference sequences.

TABLE 4

| | Associated Cancer (e.g., | |
|---|---|---|
| Gene | indicator of syndrome or | |
| Symbol | hereditary cancer risk) | Syndrome (if any) |
| APC | Colon | FAP |
| ATM | Breast | Ataxia Telangiectasia |
| BARD1 | Breast | |
| BMPR1A | GI | Juvenile Polyposis Syndrome |
| BRCA1 | Breast, Ovarian | Hereditary Breast and Ovarian |
| | | Cancer Syndrome (HBOC) |
| BRCA2 | Breast, Ovarian | HBOC |
| BRIP1 | Breast, | |
| CDH1 | Breast, Gastric | Hereditary Diffuse Gastric Cancer |
| CDK4 | Melanoma | Hereditary Melonoma (aka |
| | | Multiple Nevi Syndrome) |
| CDKN2A | Melanoma, Pancreatic | Hereditary Melonoma (aka |
| | | Multiple Nevi Syndrome) |
| CHEK2 | Breast, Colon | |
| HOXB13 | Prostate | |
| MLH1 | Colon, Endometrial, | Lynch Syndrome (aka Hereditary |
| | Ovarian | Non-Polyposis Colorectal Cancer |
| | | or HNPCC) |
| MLH3 | Colon, Endometrial, | Lynch Syndrome |
| | Ovarian | |
| MRE11 | | |
| MSH2 | Colon, Endometrial, | Lynch Syndrome |
| | Ovarian | |
| MSH6 | Colon, Endometrial, | Lynch Syndrome |
| | Ovarian | |
| MUTYH | Colon | MYH-associated polyposis |
| NBN | Breast | |
| PALB2 | Pancreatic, Breast | |
| PMS2 | Colon, Endometrial, | Lynch Syndrome |
| | Ovarian | |
| PTEN | Breast, Endometrial | Cowden Syndrome |
| RAD50 | Breast | |
| RAD51C | Breast, Ovarian | HBOC |
| RAD51D | Ovarian | HBOC |
| SMAD4 | GI | Juvenile Polyposis Syndrome |
| STK11 | GI, Breast | Peutz-Jeghers Syndrome |
| EPCAM | Colon, Endometrial, | Lynch Syndrome |
| | Ovarian | |
| TP53 | Breast, Brain, Sarcoma | Li-Fraumeni Syndrome |

[0035] In some embodiments the panel of the invention to be assessed in a particular patient depends on the specific cancer(s) or syndrome(s) for which the patient is apparently at risk. For example, as shown in Example 2 below, a patient presenting with indicators of HBOC may be tested for a panel of test genes comprising Panel D (or Panel P) or any subpanel comprising the top 2, 3, 4, 5, 6, 7, 8, 9, 10, 11, or 12 genes of Panel D (or Panel P). Thus, in some embodiments of the methods and systems described above the patient is identified as having one or more indicators of a syndrome listed in Table 4, or otherwise having one or more indicators of an increased predisposition to one or more of the cancers listed in Table 4, and the patient is tested for a panel comprising genes whose mutations are associated with that syndrome or cancer. In some embodiments an indicator of a particular syndrome listed in Table 4 is present when the patient has one or more of the corresponding cancers listed in Table 4 (e.g., an indicator of Lynch syndrome may be endometrial cancer in the patient).

[0036] In some embodiments the genes of Panel P may be added iteratively to BRCA1 and BRCA2, which may include reflex testing later genes upon determining the patient is negative for earlier genes. In some embodiments the panel of test genes comprises BRCA1, BRCA2 and CHEK2. In some embodiments, the panel of test genes comprises BRCA1, BRCA2, CHEK2; and any one, two or three of ATM, NBN and/or PALB2. In some embodiments, the panel of test genes comprises BRCA1, BRCA2, CHEK2; any one, two or three of ATM, NBN and/or PALB2; and any one or two of BARD1 and/or BRIP1. In some embodiments, the panel of test genes comprises BRCA1, BRCA2, CHEK2; any one, two or three of ATM, NBN and/or PALB2; any one or two of BARD1 and/or BRIP1; and PMS2. In some embodiments, the panel of test genes comprises BRCA1, BRCA2, CHEK2; any one, two or three of ATM, NBN and/or PALB2; any one or two of BARD1 and/or BRIP1; PMS2; and any one, two or three of MSH2, MSH6 and/or TP53. In some embodiments, the panel of test genes comprises BRCA1, BRCA2, CHEK2; any one, two or three of ATM, NBN and/or PALB2; any one or two of BARD1 and/or BRIP1; PMS2; any one, two or three of MSH2, MSH6 and/or TP53; and MUTYH.

[0037] In some embodiments, the invention provides a method of diagnosing increased risk of breast or ovarian cancer comprising (1) identifying the patient as having at least one indicator of a genetic predisposition to breast or ovarian cancer; (2) assaying a sample from the patient to detect one or more mutations in a plurality of test genes comprising at least 3 (e.g., the top 3, 4, 5, 6, 7, 8, 9, 10, 11 or 12) genes in Panel D; and (3)(a) diagnosing the patient as having an increased risk of breast or ovarian cancer if a mutation is detected in step (2) or (3)(b) diagnosing the patient as not having an increased risk of breast or ovarian cancer if no mutation is detected in step (2).

[0038] In some embodiments, an indicator of genetic predisposition to breast or ovarian cancer is any of the following:
[0039] Personal and/or family history of ovarian cancer;
[0040] Personal and/or family history of breast cancer (e.g., diagnosed before a certain age (e.g., 35, 40, 45, 50, 55, 60, 65 or 70));
[0041] Personal and/or family history of two primary breast cancers;
[0042] Personal and/or family history of male breast cancer;
[0043] Personal and/or family history of triple negative breast cancer;
[0044] Ashkenazi Jewish descent with personal and/or family history of breast, ovarian, pancreatic, or aggressive prostate cancer (Gleason score of >7);
[0045] Personal and/or family history of three or more cancers chosen from breast, ovarian, pancreatic, or aggressive prostate cancer (Gleason score of >7); or
[0046] A previously identified mutation in any close blood relative in any of the at least 3 genes from Panel D.
   As used above, “breast cancer” includes both invasive cancer and ductal carcinoma in situ (DCIS) and “ovarian cancer” includes epithelial ovarian cancer, fallopian tube cancer, and primary peritoneal cancer. As used above, “personal history” of any of these indicators means patient has been identified as having the indicator (e.g., the patient has been diagnosed as having triple negative breast cancer). As used above, “family history” of any of these indicators means a close blood relative having such indicator and “close blood relative” means a 1^{st}, 2^{nd}, or 3^{rd} degree relative in either the maternal or paternal lineage.

[0047] In some embodiments, the invention provides a method of diagnosing increased risk of a Lynch syndrome cancer comprising (1) identifying the patient as having at least one indicator of a genetic predisposition to a Lynch syndrome cancer; (2) assaying a sample from the patient to detect one or more mutations in a plurality of test genes comprising at least 3 (e.g., the top 3, 4, 5, 6, 7, 8, 9, 10, 11 or 12) genes in Panel E; and (3)(a) diagnosing the patient as having an increased risk of the cancer if a mutation is detected in step (2) or (3)(b) diagnosing the patient as not having an increased risk of the cancer if no mutation is detected in step (2). As described in Example 3 below, the inventors have made the surprising discovery that mutations in BRCA1 and BRCA2 make a significant contribution to patients having Lynch syndrome. Thus in some embodiments the plurality of test genes comprises (a) MLH1, BRCA1, BRCA2; (b) MLH1, MSH2, BRCA1, BRCA2; (c) MLH1, MSH2, MSH6, BRCA1, BRCA2; (d) MLH1, MSH2, PMS2, BRCA1, BRCA2; (e) MLH1, MSH2, MUTYH, BRCA1, BRCA2; (f) MLH1, MSH2, MSH6, PMS2, BRCA1, BRCA2; (g) MLH1, MSH2, MSH6, PMS2, MUTYH, BRCA1, BRCA2; or (g) MLH1, MSH2, MSH6, PMS2, MUTYH, EPCAM, BRCA1, BRCA2.

[0048] In some embodiments, an indicator of genetic predisposition to a Lynch syndrome cancer is any of the following:
[0049] Personal and/or family history of colorectal or endometrial cancer (e.g., before a certain age (e.g., 35, 40, 45, 50, 55, 60, 65 or 70));
[0050] Personal and/or family history of colorectal cancer with MSI High histology (e.g., before a certain age (e.g., 35, 40, 45, 50, 55, 60, 65 or 70)), with examples of MSI high histology including any of the following:
   [0051] Mucinous
   [0052] Signet ring
   [0053] Tumor infiltrating lymphocytes
   [0054] Crohn's-like lymphocytic reaction
   [0055] Medullary growth pattern;
[0056] Personal and/or family history of colorectal or endometrial cancer with abnormal MSI/IHC tumor test result;
[0057] Personal and/or family history of two or more Lynch syndrome cancers, including cases where at least one is before a certain age (e.g., 35, 40, 45, 50, 55, 60, 65 or 70);
[0058] Personal history of Lynch syndrome cancer with family history of a Lynch syndrome cancer;
[0059] Three or more close blood relatives with a Lynch syndrome cancer; or
[0060] A previously identified mutation in any close blood relative in any of the at least 3 genes from Panel E.
   As used above, “Lynch syndrome cancer” may include any of the following: colorectal cancer, endometrial cancer, gastric cancer, ovarian cancer, ureter/renal pelvic cancer, biliary tract cancer, small bowel cancer, pancreatic cancer, brain cancer, or sebaceous adenomas. As used above, “personal history” of any of these indicators means patient has been identified as having the indicator (e.g., the patient has been diagnosed as having endometrial cancer). As used above, “family history” of any of these indicators means a close blood relative having such indicator and “close blood relative” means a 1^{st}, 2^{nd}, or 3^{rd} degree relative in either the maternal or paternal lineage.

[0061] The nucleic acids to be analyzed in the methods and systems of the invention may vary in size. Thus, in some embodiments A=10, 11, 12, 13, 14, 15, 16, 17, 18, 19, 20, 25, 30, 35, 40, 45, 50, 60, 70, 80, 90, 100, 125, 150, 175, 200, 250, 300, 350, 400, 450, 500, 600, 700, 800, 900, 1,000, 1,250, 1,500, 1,750, 2,000, 2,500, 3,000, 3,500, 4,000, 5,000, 6,000, 7,000, 8,000, 9,000, 10,000, 12,000, 14,000, 16,000, 18,000, 20,000, 25,000, 30,000, 35,000, 40,000, 45,000, 50,000, 60,000, 70,000, 80,000, or 90,000, or more and B=15, 16, 17, 18, 19, 20, 25, 30, 35, 40, 45, 50, 60, 70, 80, 90, 100, 125, 150, 175, 200, 250, 300, 350, 400, 450, 500, 600, 700, 800, 900, 1,000, 1,250, 1,500, 1,750, 2,000, 2,500, 3,000, 3,500, 4,000, 5,000, 6,000, 7,000, 8,000, 9,000, 10,000, 12,000, 14,000, 16,000, 18,000, 20,000, 25,000, 30,000, 35,000, 40,000, 45,000, 50,000, 60,000, 70,000, 80,000, 90,000, or 100,000 or more. These embodiments include every combination of A and B as set forth in the preceding sentence, where B>A. For example, the nucleic acids to be analyzed may comprise (or consist of or consist essentially of) a range of nucleotides in length from any A to any B (e.g., from 10 to 15, 10 to 20, [ . . . ] 100 to 125, 100 to 150, etc.).

[0062] In some embodiments the plurality of DNA molecules comprises at least some length of intronic sequence adjacent to some (or all) of said one or more exons. In some embodiments, the plurality of DNA molecules comprises at least 1, 2, 3, 4, 5, 6, 7, 8, 9, 10, 15, 20, 25, 30, 35, 40, 45, 50, 60, 70, 80, 90, 100, 200, 300, 400, 500 or more base pairs of the intronic sequence on one or both sides of the exon(s). This may comprise some portion of the sequences disclosed herein, using Table 3 as reference for where exons and introns begin and end. For example, in one embodiment the plurality of DNA molecules comprises the exons of, e.g., the APC gene plus at least 20 intronic nucleotides upstream and 10 intronic nucleotides downstream of each exon. For Exon 3 of APC, for example, this would mean the plurality of DNA molecules comprises Exon 3 (nucleotides 501-702 of SEQ ID NO:7) and further comprises the first 20 nucleotides of the intron upstream of Exon 3 (nucleotides 481-500 of SEQ ID NO:7) and the first 10 nucleotides of the intron downstream of Exon 3 (nucleotides 703-712 of SEQ ID NO:7). Those skilled in the art can apply this to the other genes, exons, and sequences referenced in Table 3.

[0063] As mentioned above, the nucleic acids to be analyzed in the methods and systems of the invention comprise one or more exons of a plurality of genes. As used herein, a plurality of nucleic acid molecules comprises a sequence or group of sequences if such plurality of molecules together comprises the sequence or group of sequences. Multiple molecules together comprise a single sequence when the non-redundant sequences of the multiple molecules comprise such sequence. For example, a plurality of molecules may comprise the sequence of Exon 3 of the APC gene, which is just over 200 nucleotides long, despite each molecule being no more than 60 nucleotides long. This is true if the non-redundant sequences from the plurality of molecules, when considered end to end, comprise the full sequence of Exon 3. This example is illustrated in FIG. 1, which shows how a plurality of DNA molecules can comprise Exon 3 of the APC gene plus 10 upstream and 10 downstream intronic nucleotides. No single molecule comprises all of Exon 3. When they are aligned, however, the non-redundant sequences of these molecules (underlined nucleotides in Read1 to Read6) “together” make up a sequence (Composite) that comprises Exon 3 of the APC gene plus 10 upstream and 10 downstream intronic nucleotides (underlined nucleotides of Composite). As illustrated in FIG. 1 (Read1 and Read2), the molecules to be analyzed may comprise additional moieties that may include additional nucleotides and nucleotide sequences, fluorescent labels, conjugated antibodies or other proteins. Such molecules may still “together” comprise sequence of interest if the non-redundant nucleotide sequences of the molecules end-to-end comprise that sequence.

[0064] The total number of genes analyzed in the methods, systems and kits of the invention may vary depending on resource and technical constraints. Thus, in some embodiments W=2, 3, 4, 5, 6, 7, 8, 9, 10, 11, 12, 13, 14, 15, 16, 17, 18, 19, 20, 21, 22, 23, 24, 25, 26, 27, 28, 29, 30, 31, 32, 33, 34, 35, 36, 37, 38, 39, 40, 41, 42, 43, 44, 45, 46, 47, 48, 49, 50, 51, 52, 53, 54, 55, 56, 57, 58, 59, 60, 61, 62, 63, 64, 65, 66, 67, 68, or 69 or more and X=3, 4, 5, 6, 7, 8, 9, 10, 11, 12, 13, 14, 15, 16, 17, 18, 19, 20, 25, 30, 35, 40, 45, 50, 60, 70, 80, 90, 100, 125, 150, 175, 200, 250, 300, 350, 400, 450, 500, 600, 700, 800, 900, 1,000, 1,250, 1,500, 1,750, 2,000, 2,500, 3,000, 3,500, 4,000, 5,000, 6,000, 7,000, 8,000, 9,000, 10,000, 12,000, 14,000, 16,000, 18,000, or 20,000 or more. These embodiments include every combination of W and X as set forth in the preceding sentence, where X>W. For example, the plurality of genes to be analyzed may comprise (or consist of or consist essentially of) a range of genes in number from any W to any X (e.g., from 10 to 15, 10 to 20, [ . . . ] 100 to 125, 100 to 150, etc.).

[0065] The plurality of genes analyzed in the methods, systems and kits of the invention will comprise at least some of the genes listed in Panels A-Q. Thus, in some embodiments the plurality of genes comprises at least 2, 3, 4, 5, 6, 7, 8, 9, 10, 11, 12, 13, 14, 15, 16, 17, 18, 19, 20, 21, 22, 23, 24, 25, 26, 27, 28, 29, 30, 31, 32, 33, 34, 35, 36, 37, 38, 39, 40, 41, 42, 43, 44, 45, 46, 47, 48, 49, 50, 51, 52, 53, 54, 55, 56, 57, 58, 59, 60, 61, 62, 63, 64, 65, 66, 67, 68, or 69 genes listed in Panels A-Q. In some embodiments the plurality of genes comprises gene numbers between Y and Z of any of Panels A-Q. In some such embodiments, Y=1, 2, 3, 4, 5, 6, 7, 8, 9, 10, 11, 12, 13, 14, 15, 16, 17, 18, 19, 20, 21, 22, 23, 24, 25, 26, 27, 28, 29, 30, 31, 32, 33, 34, 35, 36, 37, 38, 39, 40, 41, 42, 43, 44, 45, 46, 47, 48, 49, 50, 51, 52, 53, 54, 55, 56, 57, 58, 59, 60, 61, 62, 63, 64, 65, 66, 67 or 68 and Z=2, 3, 4, 5, 6, 7, 8, 9, 10, 11, 12, 13, 14, 15, 16, 17, 18, 19, 20, 21, 22, 23, 24, 25, 26, 27, 28, 29, 30, 31, 32, 33, 34, 35, 36, 37, 38, 39, 40, 41, 42, 43, 44, 45, 46, 47, 48, 49, 50, 51, 52, 53, 54, 55, 56, 57, 58, 59, 60, 61, 62, 63, 64, 65, 66, 67, 68, or 69. In some embodiments, said plurality of genes comprises gene numbers 1 & 2, 2 & 3, 3 & 4, 4 & 5, 5 & 6, 6 & 7, 7 & 8, 8 & 9, 9 & 10, 10 & 11, 11 & 12, 12 & 13, 13 & 14, 14 & 15, 15 & 16, 16 & 17, 17 & 18, 18 & 19, 19 & 20, 20 & 21, 21 & 22, 22 & 23, 23 & 24, 24 & 25, 25 & 26, 26 & 27, 27 & 28, 28 & 29, 29 & 30, 30 & 31, 31 & 32, 32 & 33, 33 & 34, 34 & 35, 35 & 36, 36 & 37, 37 & 38, 38 & 39, 39 & 40, 40 & 41, 41 & 42, 42 & 43, 43 & 44, 44 & 45, 45 & 46, 46 & 47, 47 & 48, 48 & 49, 49 & 50, 50 & 51, 51 & 52, 52 & 53, 53 & 54, 54 & 55, 55 & 56, 56 & 57, 57 & 58, 58 & 59, 59 & 60, 60 & 61, 61 & 62, 62 & 63, 63 & 64, 64 & 65, 65 & 66, 66 & 67, 67 & 68, or 68 & 69 from any of Panels A-Q. These embodiments include every combination of Y and Z as set forth in the preceding sentences, where Y>Z. For example, the plurality of genes to be analyzed may comprise (or consist of or consist essentially of) a range of genes with a number from any Y to any Z in any of Panels A-Q (e.g., from 1 to 2, 1 to 3, 1 to 4, [ . . . ] 1 to 55, 2 to 3, 2 to 4, 2 to 5, [ . . . ] 2 to 55, etc.). In some embodiments the genes chosen from Panels A-Q comprise at least some percentage, e.g., 1%, 2%, 3%, 4%, 5%, 6%, 7%, 8%, 9%, 10%, 11%, 12%, 13%, 14%, 15%, 16%, 17%, 18%, 19%, 20%, 25%, 30%, 35%, 40%, 45%, 50%, 60%, 70%, 80%, 90%, 91%, 92%, 93%, 94%, 95%, 96%, 97%, 98%, 99%, or 100%, of the plurality of genes to be analyzed.

[0066] In some embodiments the plurality of DNA molecules comprises at least some length of intronic sequence adjacent to some (or all) of said one or more exons. In some embodiments, the plurality of DNA molecules comprises at least 1, 2, 3, 4, 5, 6, 7, 8, 9, 10, 15, 20, 25, 30, 35, 40, 45, 50, 60, 70, 80, 90, 100, 200, 300, 400, 500 or more base pairs of the intronic sequence.

[0067] In some embodiments, the plurality of genes comprises the genes in any of Panels A-Q, with the proviso that the genes do not include one or more of BRCA1, BRCA2, PTEN, PALB2, CHEK2, BRIP1, BARD1, CDH1, ATM, RAD50, MRE11A, NBN, RAD51C, TP53, or STK11. In some embodiments, the plurality of genes comprises BRCA1, BRCA2, PTEN, PALB2, CHEK2, BRIP1, BARD1, CDH1, ATM, RAD50, MRE11A, NBN, RAD51C, TP53, and STK11 together with at least 1, 2, 3, 4, 5, 6, 7, 8, 9, 10 or more additional gene(s) (including gene number(s) 1, 2, 3, 4, 5, 6, 7, 8, 9, or 10) from any of Panels A-Q.

[0068] In some embodiments, the plurality of genes comprises the genes in any of Panels A-Q, with the proviso that the genes do not include one or more of MLH1, MSH2, MSH6, PMS2, EPCAM, APC or MUTYH. In some embodiments, the plurality of genes comprises MLH1, MSH2, MSH6, PMS2, EPCAM, APC and MUTYH together with at least 1, 2, 3, 4, 5, 6, 7, 8, 9, 10 or more additional gene(s) (including gene number(s) 1, 2, 3, 4, 5, 6, 7, 8, 9, or 10) from any of Panels A-Q.

[0069] In some embodiments, the plurality of genes comprises the genes in any of Panels A-Q, with the proviso that the genes do not include one or more of BRCA1, BRCA2, BRIP1, BARD1, CHEK2, MRE11A, NBN, RAD50, RAD51C, PALB2, TP53, PTEN, STK11, CDH1, ATM, MLH1, MSH2, MSH6, PMS1, PMS2 or MUTYH. In some embodiments, the plurality of genes comprises BRCA1, BRCA2, BRIP1, BARD1, CHEK2, MRE11A, NBN, RAD50, RAD51C, PALB2, TP53, PTEN, STK11, CDH1, ATM, MLH1, MSH2, MSH6, PMS1, PMS2 and MUTYH together with at least 1, 2, 3, 4, 5, 6, 7, 8, 9, 10 or more additional gene(s) (including gene number(s) 1, 2, 3, 4, 5, 6, 7, 8, 9, or 10) from any of Panels A-Q.

[0070] In some embodiments, the plurality of genes comprises the genes in any of Panels A-Q, with the proviso that the genes do not include one or more of PTEN, PALB2, STK11, CHEK2, ATM or TP53. In some embodiments, the plurality of genes comprises PTEN, PALB2, STK11, CHEK2, ATM and TP53 together with at least 1, 2, 3, 4, 5, 6, 7, 8, 9, 10 or more additional gene(s) (including gene number(s) 1, 2, 3, 4, 5, 6, 7, 8, 9, or 10) from any of Panels A-Q.

[0071] In some embodiments, the plurality of genes comprises the genes in any of Panels A-Q, with the proviso that the genes do not include one or more of MLH1, MSH2, MSH6, PMS2 or EPCAM. In some embodiments, the plurality of genes comprises MLH1, MSH2, MSH6, PMS2 and EPCAM together with at least 1, 2, 3, 4, 5, 6, 7, 8, 9, 10 or more additional gene(s) (including gene number(s) 1, 2, 3, 4, 5, 6, 7, 8, 9, or 10) from any of Panels A-Q.

[0072] In some embodiments, the plurality of genes comprises the genes in any of Panels A-Q, with the proviso that the genes do not include one or more of MLH1, MSH2, MSH6, or PMS2. In some embodiments, the plurality of genes comprises MLH1, MSH2, MSH6, and PMS2 together with at least 1, 2, 3, 4, 5, 6, 7, 8, 9, 10 or more additional gene(s) (including gene number(s) 1, 2, 3, 4, 5, 6, 7, 8, 9, or 10) from any of Panels A-Q.

[0073] In some embodiments, the plurality of genes comprises the genes in any of Panels A-Q, with the proviso that the genes do not include one or more of ACCA, COMT, CYP11B2, CYP19, CYP1A1, CYP1B1, EPHX, ERA, FASL, IGF2, INS, KLK10, MSH6, RAD51L3, SOD2, VDR, XPG, or XRCC2. In some embodiments, the plurality of genes comprises ACCA, COMT, CYP11B2, CYP19, CYP1A1, CYP1B1, EPHX, ERA, FASL, IGF2, INS, KLK10, MSH6, RAD51L3, SOD2, VDR, XPG, and XRCC2 together with at least 1, 2, 3, 4, 5, 6, 7, 8, 9, 10 or more additional gene(s) (including gene number(s) 1, 2, 3, 4, 5, 6, 7, 8, 9, or 10) from any of Panels A-Q.

[0074] In some embodiments, the plurality of genes comprises the genes in any of Panels A-Q, with the proviso that the genes do not include one or more of BRCA1, BRCA2, CHEK2, RAD51, or NBN. In some embodiments, the plurality of genes comprises BRCA1, BRCA2, CHEK2, RAD51, and NBN together with at least 1, 2, 3, 4, 5, 6, 7, 8, 9, 10 or more additional gene(s) (including gene number(s) 1, 2, 3, 4, 5, 6, 7, 8, 9, or 10) from any of Panels A-Q.

[0075] In some embodiments, the plurality of genes comprises the genes in any of Panels A-Q, with the proviso that the genes do not include one or more of ABL1, AKT1, ALK, APC, ATM, BRAF, CDH1, CDKN2A, CSF1R, CTNNB1, EGFR, ERBB2, ERBB4, FBXW7, FGFR1, FGFR2, FGFR3, FLT3, GNAS, HNF1A, HRAS, IDH1, JAK2, JAK3, KDR, KIT, KRAS, MET, MLH1, MPL, NOTCH1, NPM1, NRAS, PDGFRA, PIK3CA, PTEN, PTPN11, RB1, RET, SMAD4, SMARCB1, SMO, SRC, STK11, TP53, or VHL. In some embodiments, the plurality of genes comprises ABL1, AKT1, ALK, APC, ATM, BRAF, CDH1, CDKN2A, CSF1R, CTNNB1, EGFR, ERBB2, ERBB4, FBXW7, FGFR1, FGFR2, FGFR3, FLT3, GNAS, HNF1A, HRAS, IDH1, JAK2, JAK3, KDR, KIT, KRAS, MET, MLH1, MPL, NOTCH1, NPM1, NRAS, PDGFRA, PIK3CA, PTEN, PTPN11, RB1, RET, SMAD4, SMARCB1, SMO, SRC, STK11, TP53, and VHL together with at least one additional gene from any of Panels A-Q.

[0076] As used herein, a “deficiency” in a gene means the presence of some sequence, copy number, expression or epigenetic variation from wild-type in the gene that leads to a deleterious change in function. Sequence variations include point mutations, small (e.g., less than 1,000 nucleotides) deletions and insertions (including frameshift mutations), large (e.g., greater than 1,000 nucleotides) deletions and insertions, and transversions (e.g., reversal of direction in a region of the gene). Copy number variations include amplifications and deletions of substantially an entire gene. Epigenetic variations include variations in methylation, acetylation, etc. In the case of tumor suppressors, a deleterious change in function will generally be attenuated function. Examples include lowered or abolished transcription, lowered or abolished protein expression, and lowered or abolished protein function. Many variations that will lead to such changes may be recognized by those skilled in the art based on the present disclosure, including frameshift or nonsense (premature stop) mutations; deletions, amplifications or transversions in large regions of the gene; missense mutations in critical interaction, structural or enzymatic regions; etc. In the case of oncogenes, a deleterious change in function will generally be heightened function. Examples include heightened transcription, heightened protein expression, and heightened protein function. Many variations that will lead to such changes may be recognized by those skilled in the art based on the present disclosure, including amplification of the gene and activating mutations in enzymatic regions.

[0077] As used herein, a “germline” deficiency is any deficiency that is found in the germline of the individual as opposed to deficiencies found only in somatic tissues. For example, a deficiency found in a tumor tissue may either have originated in the germline or arisen somatically. Germline deficiencies may be detected by analyzing various types of samples. Generally, these samples will contain or be derived from cells expected to represent the germline. Examples include white blood cells, germ cells, etc. In some embodiments the nucleic acid analyzed is genomic DNA from such a cell (or DNA (e.g., PCR amplified DNA) derived therefrom). In other embodiments, the nucleic acid analyzed is transcript RNA (or complementary DNA transcribed therefrom) from such a cell. In some embodiments, protein derived from such a cell is analyzed for structural (e.g., amino acid sequence) and functional deficiencies.

[0078] Those skilled in the art are familiar with various techniques for sequencing nucleic acids in a sample. Useful techniques include, but are not limited to, Sanger sequencing, sequencing by synthesis (e.g., as described in U.S. Pat. Nos. 6,828,100, 7,276,720, and 7,283,337 and U.S. application publication nos. US20110212437, US20110229877, US20110177498, US20120064599, and US20120058468), single-molecule sequencing (e.g., as described in U.S. Pat. Nos. 8,148,516 and 8,137,569 and U.S. application publication nos. US20110212437, US20110229877, US20110177498, US20120064599, and US20120058468), etc. Examples include techniques developed by Applied Biosystems™ (SOLiD™), Illumina™ (HiSeq™), 454™, Pacific Biosciences™ (SMRT™), and Oxford Nanopore™ (GridION™ and MinION™), each of which is well-known to those skilled in the art.

[0079] As discussed above, the methods of the invention generally involve sequencing a panel of genes described herein. With modern techniques, it is often possible to sequence tens, hundreds or thousands of genes. Indeed, it is possible to sequence the entire genome. Once such a global assay has been performed, one may then informatically analyze one or more subsets of genes (i.e., panels or, as often used herein, pluralities of test genes). After sequencing hundreds or thousands of genes in a sample, for example, one may analyze (e.g., informatically) the sequences of a panel or plurality of test genes comprising primarily genes in any of Panels A-Q according to the present invention (e.g., to determine whether a patient has an increased risk of a particular cancer).

[0080] As used herein, a patient has an “increased risk” of a particular cancer if the probability of the patient developing that cancer (e.g., over the patient's lifetime, over some defined period of time (e.g., within 10 years), etc.) exceeds some reference probability or value. The reference probability may be the probability (i.e., prevalence) of the cancer across the general relevant patient population (e.g., all patients; all patients of a particular age, gender, ethnicity; patients having a particular cancer (and thus looking at the risk of a different cancer or an independent second primary of the same type as the first cancer); etc.). For example, if the lifetime probability of a particular cancer in the general population (or some specific subpopulation) is X % and a particular patient has been determined by the methods, systems or kits of the present invention to have a lifetime probability of that cancer of Y %, and if Y>X, then the patient has an “increased risk” of that cancer. Alternatively, the tested patient's probability may only be considered “increased” when it exceeds the reference probability by some threshold amount (e.g., at least 0.5, 0.75, 0.85, 0.90, 0.95, 1, 2, 3, 4, 5, 6, 7, 8, 9, or 10 or more fold or standard deviations greater than the reference probability; at least 1%, 2%, 3%, 4%, 5%, 6%, 7%, 8%, 9%, 10%, 11%, 12%, 13%, 14%, 15%, 16%, 17%, 18%, 19%, 20%, 25%, 30%, 35%, 40%, 45%, 50%, 60%, 70%, 80%, 90%, 91%, 92%, 93%, 94%, 95%, 96%, 97%, 98%, or 99% greater than the reference probability).

[0081] The results of any analyses according to the invention will often be communicated to physicians, genetic counselors and/or patients (or other interested parties such as researchers) in a transmittable form that can be communicated or transmitted to any of the above parties. Such a form can vary and can be tangible or intangible. The results can be embodied in descriptive statements, diagrams, photographs, charts, images or any other visual forms. For example, graphs showing expression or activity level or sequence variation information for various genes can be used in explaining the results. Diagrams showing such information for additional target gene(s) are also useful in indicating some testing results. The statements and visual forms can be recorded on a tangible medium such as papers, computer readable media such as floppy disks, compact disks, etc., or on an intangible medium, e.g., an electronic medium in the form of email or website on internet or intranet. In addition, results can also be recorded in a sound form and transmitted through any suitable medium, e.g., analog or digital cable lines, fiber optic cables, etc., via telephone, facsimile, wireless mobile phone, internet phone and the like.

[0082] Thus, the information and data on a test result can be produced anywhere in the world and transmitted to a different location. As an illustrative example, when a sequencing (or genotyping) assay is conducted outside the United States, the information and data on a test result may be generated, cast in a transmittable form as described above, and then imported into the United States. Accordingly, the present invention also encompasses methods and systems for producing a transmittable form of sequence information for at least one patient sample. The method comprises the steps of (1) sequencing nucleic acids in a sample according to methods of the present invention; and (2) embodying the result of the sequencing step in a transmittable form. The transmittable form is a product of such a method.

[0083] Techniques for analyzing sequence data (indeed any data obtained according to the invention) will often be implemented using hardware, software or a combination thereof in one or more computer systems or other processing systems capable of effectuating such analysis.

[0084] The sample analyzer in the systems of the invention can be any instrument useful in sequencing nucleic acids, including but not limited to, Illumina HiSeg™, Ion Torrent PGM, ABI SOLiD™ sequencer, PacBio RS, Helicos Heliscope™, or any instrument utilizing a sequencing system discussed above.

[0085] The computer-based analysis function can be implemented in any suitable language and/or browsers. For example, it may be implemented with C language and preferably using object-oriented high-level programming languages such as Visual Basic, SmallTalk, C++, and the like. The application can be written to suit environments such as the Microsoft Windows™ environment including Windows™ 98, Windows™ 2000, Windows™ NT, and the like. In addition, the application can also be written for the Macintosh™, SUN™, UNIX or LINUX environment. In addition, the functional steps can also be implemented using a universal or platform-independent programming language. Examples of such multi-platform programming languages include, but are not limited to, hypertext markup language (HTML), JAVA™, JavaScript™, Flash programming language, common gateway interface/structured query language (CGI/SQL), practical extraction report language (PERL), AppleScript™ and other system script languages, programming language/structured query language (PL/SQL), and the like. Java™—or JavaScript™-enabled browsers such as HotJava™, Microsoft™ Explorer™, or Netscape™ can be used. When active content web pages are used, they may include Java™ applets or ActiveX™ controls or other active content technologies.

[0086] The analysis function can also be embodied in computer program products and used in the systems described above or other computer- or internet-based systems. Accordingly, another aspect of the present invention relates to a computer program product comprising a computer-usable medium having computer-readable program codes or instructions embodied thereon for enabling a processor to carry out gene status analysis. These computer program instructions may be loaded onto a computer or other programmable apparatus to produce a machine, such that the instructions which execute on the computer or other programmable apparatus create means for implementing the functions or steps described above. These computer program instructions may also be stored in a computer-readable memory or medium that can direct a computer or other programmable apparatus to function in a particular manner, such that the instructions stored in the computer-readable memory or medium produce an article of manufacture including instruction means which implement the analysis. The computer program instructions may also be loaded onto a computer or other programmable apparatus to cause a series of operational steps to be performed on the computer or other programmable apparatus to produce a computer implemented process such that the instructions which execute on the computer or other programmable apparatus provide steps for implementing the functions or steps described above.

[0087] One example of a computer system of the invention is the computer system [200] illustrated in FIG. 2. Computer system [200] may include at least one input module [230] for entering patient data into the computer system [200]. The computer system [200] may include at least one output module [224] for indicating whether a patient has an increased or decreased likelihood of response and/or indicating suggested treatments determined by the computer system [200]. Computer system [200] may include at least one memory module [206] in communication with the at least one input module [230] and the at least one output module [224].

[0088] The at least one memory module [206] may include, e.g., a removable storage drive [208], which can be in various forms, including but not limited to, a magnetic tape drive, a floppy disk drive, a VCD drive, a DVD drive, an optical disk drive, etc. The removable storage drive [208] may be compatible with a removable storage unit [210] such that it can read from and/or write to the removable storage unit [210]. Removable storage unit [210] may include a computer usable storage medium having stored therein computer-readable program codes or instructions and/or computer readable data. For example, removable storage unit [210] may store patient data. Example of removable storage unit [210] are well known in the art, including, but not limited to, floppy disks, magnetic tapes, optical disks, and the like. The at least one memory module [206] may also include a hard disk drive [212], which can be used to store computer readable program codes or instructions, and/or computer readable data.

[0089] In addition, as shown in FIG. 2, the at least one memory module [206] may further include an interface [214] and a removable storage unit [216] that is compatible with interface [214] such that software, computer readable codes or instructions can be transferred from the removable storage unit [216] into computer system [200]. Examples of interface [214] and removable storage unit [216] pairs include, e.g., removable memory chips (e.g., EPROMs or PROMs) and sockets associated therewith, program cartridges and cartridge interface, and the like. Computer system [200] may also include a secondary memory module [218], such as random access memory (RAM).

[0090] Computer system [200] may include at least one processor module [202]. It should be understood that the at least one processor module [202] may consist of any number of devices. The at least one processor module [202] may include a data processing device, such as a microprocessor or microcontroller or a central processing unit. The at least one processor module [202] may include another logic device such as a DMA (Direct Memory Access) processor, an integrated communication processor device, a custom VLSI (Very Large Scale Integration) device or an ASIC (Application Specific Integrated Circuit) device. In addition, the at least one processor module [202] may include any other type of analog or digital circuitry that is designed to perform the processing functions described herein.

[0091] As shown in FIG. 2, in computer system [200], the at least one memory module [204], the at least one processor module [202], and secondary memory module [218] are all operably linked together through communication infrastructure [220], which may be a communications bus, system board, cross-bar, etc.). Through the communication infrastructure [220], computer program codes or instructions or computer readable data can be transferred and exchanged. Input interface [226] may operably connect the at least one input module [226] to the communication infrastructure [220]. Likewise, output interface [222] may operably connect the at least one output module [224] to the communication infrastructure [220].

[0092] The at least one input module [230] may include, for example, a keyboard, mouse, touch screen, scanner, and other input devices known in the art. The at least one output module [224] may include, for example, a display screen, such as a computer monitor, TV monitor, or the touch screen of the at least one input module [230]; a printer; and audio speakers. Computer system [200] may also include, modems, communication ports, network cards such as Ethernet cards, and newly developed devices for accessing intranets or the internet.

[0093] The at least one memory module [206] may be configured for storing patient data entered via the at least one input module [230] and processed via the at least one processor module [202]. Patient data relevant to the present invention may include sequence information for one or more of the genes in any of Panels A-Q. Patient data relevant to the present invention may also include clinical parameters relevant to the patient (e.g., age, lifestyle and environmental risk factors for cancer, previously diagnosed diseases (including previously diagnosed cancers), tumor size, node status, tumor stage). Any patient data a physician might find useful in making treatment decisions/recommendations may also be entered into the system, including but not limited to age, gender, and race/ethnicity and lifestyle data such as diet information. Other possible types of patient data include symptoms currently or previously experienced, patient's history of illnesses, medications, and medical procedures.

[0094] The at least one memory module [206] may include a computer-implemented method stored therein. The at least one processor module [202] may be used to execute software or computer-readable instruction codes of the computer-implemented method. The computer-implemented method may be configured to, based upon the patient data, indicate whether the patient has an increased likelihood of recurrence, progression or response to any particular treatment, generate a list of possible treatments, etc.

[0095] In certain embodiments, the computer-implemented method may be configured to identify a patient as having or not having an increased risk of a particular cancer. For example, the computer-implemented method may be configured to inform a physician that a particular patient has an increased risk of a particular cancer. Alternatively or additionally, the computer-implemented method may be configured to actually suggest a particular course of treatment based on the answers to/results for various queries.

[0096] FIG. 3 illustrates one embodiment of a computer-implemented method [300] of the invention that may be implemented with the computer system [200] of the invention. The method [300] begins with one of multiple queries ([310], [311], [312]), either sequentially or substantially simultaneously. If the answer to/result for any of these queries is “Yes” [320], the method concludes [330] that the patient has an increased risk of a particular cancer (e.g., breast cancer if there is a germline deficiency in BRCA1). If the answer to/result for all of these queries is “No” [321], the method concludes [331] that the patient does not have, at least based on germline status of the tested genes, an increased risk of cancer. The method [300] may then proceed with more queries, make a particular treatment recommendation ([340], [341]), or simply end.

[0097] When the queries are performed sequentially, they may be made in the order suggested by FIG. 3 or in any other order. Whether subsequent queries are made can also be dependent on the results/answers for preceding queries. In some embodiments of the method illustrated in FIG. 3, for example, the method asks about BRCA1 [311] first and, if the patient has a germline deficiency then the method concludes [330] or optionally confirms by BRCA2 status [311], and/or other HCG status [312]. Optionally, the method may query clinical parameters (e.g., tumor size, age, tumor stage) before or after querying any of the molecular characteristics of HCGs as shown. As mentioned above, the preceding order of queries may be modified. In some embodiments an answer of “yes” to one query (e.g., [310]) prompts one or more of the remaining queries to confirm that the patient has, e.g., increased risk of recurrence.

[0098] In some embodiments, the computer-implemented method of the invention is open-ended. In other words, the apparent first step [310] in FIG. 3 may actually form part of a larger process and, within this larger process, need not be the first step/query. Additional steps may also be added onto the core methods discussed above. These additional steps include, but are not limited to, informing a health care professional (or the patient itself) of the conclusion reached; combining the conclusion reached by the illustrated method [300] with other facts or conclusions to reach some additional or refined conclusion regarding the patient's diagnosis, prognosis, treatment, etc.; making a recommendation for treatment (e.g., “patient should/should not undergo prophylactic mastectomy”); additional queries about additional biomarkers, clinical parameters (e.g., age, tumor size, node status, tumor stage), or other useful patient information (e.g., age at diagnosis, general patient health, etc.).

[0099] Regarding the above computer-implemented method [300], the answers to the queries may be determined by the method instituting a search of patient data for the answer. For example, to answer the respective queries ([310], [311], [312]), patient data may be searched for germline sequence data for the HCGs to be analyzed (e.g., the genes in Panel B). The queries may be performed in no particular order or according to some desired order (e.g., in order of gene number in Panel B). If such a comparison has not already been performed, the method may compare these data to some reference in order to determine if the patient has a germline deficiency in any of the HCGs being analyzed. Additionally or alternatively, the method may present one or more of the queries ([310], [311], [312]) to a user (e.g., a physician) of the computer system [200]. For example, the questions ([310], [311], [312]) may be presented via an output module [224]. The user may then answer “Yes” or “No” or provide some other value (e.g., numerical or qualitative value representing germline HCG status) via an input module [230]. The method may then proceed based upon the answer received. Likewise, the conclusions [330, 331] may be presented to a user of the computer-implemented method via an output module [224].

[0100] The practice of the present invention may also employ conventional biology methods, software and systems. Computer software products of the invention typically include computer readable media having computer-executable instructions for performing the logic steps of the method of the invention. Suitable computer readable medium include floppy disk, CD-ROM/DVD/DVD-ROM, hard-disk drive, flash memory, ROM/RAM, magnetic tapes and etc. Basic computational biology methods are described in, for example, Setubal et al., INTRODUCTION TO COMPUTATIONAL BIOLOGY METHODS (PWS Publishing Company, Boston, 1997); Salzberg et al. (Ed.), COMPUTATIONAL METHODS IN MOLECULAR BIOLOGY, (Elsevier, Amsterdam, 1998); Rashidi & Buehler, BIOINFORMATICS BASICS: APPLICATION IN BIOLOGICAL SCIENCE AND MEDICINE (CRC Press, London, 2000); and Ouelette & Bzevanis, BIOINFORMATICS: A PRACTICAL GUIDE FOR ANALYSIS OF GENE AND PROTEINS (Wiley & Sons, Inc., 2^{nd} ed., 2001); see also, U.S. Pat. No. 6,420,108.

[0101] The present invention may also make use of various computer program products and software for a variety of purposes, such as probe design, management of data, analysis, and instrument operation. See U.S. Pat. Nos. 5,593,839; 5,795,716; 5,733,729; 5,974,164; 6,066,454; 6,090,555; 6,185,561; 6,188,783; 6,223,127; 6,229,911 and 6,308,170. Additionally, the present invention may have embodiments that include methods for providing genetic information over networks such as the Internet as shown in U.S. Ser. No. 10/197,621 (U.S. Pub. No. 20030097222); Ser. No. 10/063,559 (U.S. Pub. No. 20020183936), Ser. No. 10/065,856 (U.S. Pub. No. 20030100995); Ser. No. 10/065,868 (U.S. Pub. No. 20030120432); Ser. No. 10/423,403 (U.S. Pub. No. 20040049354).

[0102] The terms “probe” and “oligonucleotide” (also “oligo”), when used in the context of nucleic acids, interchangeably refer to a relatively short nucleic acid fragment or sequence. The invention also provides primers useful in the methods of the invention. “Primers” are oligonucleotides capable, under the right conditions and with the right companion reagents, of selectively amplifying a target nucleic acid (e.g., a target exon or gene). In the context of nucleic acids, “probe” is used herein to encompass “primer” since primers can generally also serve as probes.

[0103] The probe can generally be of any suitable size/length. In some embodiments the probe is between A and B nucleotides in length. In some embodiments A=10, 11, 12, 13, 14, 15, 16, 17, 18, 19, 20, 25, 30, 35, 40, 45, 50, 60, 70, 80, 90, 100, 125, 150, 175, 200, 250, 300, 350, 400, 450, 500, 600, 700, 800, 900, 1,000, 1,250, 1,500, 1,750, 2,000, 2,500, 3,000, 3,500, 4,000, 5,000, 6,000, 7,000, 8,000, 9,000, 10,000, 12,000, 14,000, 16,000, 18,000, 20,000, 25,000, 30,000, 35,000, 40,000, 45,000, 50,000, 60,000, 70,000, 80,000, or 90,000, or more and B=15, 16, 17, 18, 19, 20, 25, 30, 35, 40, 45, 50, 60, 70, 80, 90, 100, 125, 150, 175, 200, 250, 300, 350, 400, 450, 500, 600, 700, 800, 900, 1,000, 1,250, 1,500, 1,750, 2,000, 2,500, 3,000, 3,500, 4,000, 5,000, 6,000, 7,000, 8,000, 9,000, 10,000, 12,000, 14,000, 16,000, 18,000, 20,000, 25,000, 30,000, 35,000, 40,000, 45,000, 50,000, 60,000, 70,000, 80,000, 90,000, or 100,000 or more. These embodiments include every combination of A and B as set forth in the preceding sentence, where B>A. For example, the probe may comprise (or consist of or consist essentially of) a range of nucleotides in length from any A to any B (e.g., from 10 to 15, 10 to 20, [ . . . ] 100 to 125, 100 to 150, etc.). In some embodiments the probe has a length from about 8 to 200, 15 to 150, 15 to 100, 15 to 75, 15 to 60, or 20 to 55 bases in length. They can be labeled with detectable markers with any suitable detection marker including but not limited to, radioactive isotopes, fluorophores, biotin, enzymes (e.g., alkaline phosphatase), enzyme substrates, ligands and antibodies, etc. See Jablonski et al., NUCLEIC ACIDS RES. (1986) 14:6115-6128; Nguyen et al., BIOTECHNIQUES (1992) 13:116-123; Rigby et al., J. MOL. BIOL. (1977) 113:237-251. Indeed, probes may be modified in any conventional manner for various molecular biological applications. Techniques for producing and using such oligonucleotide probes are conventional in the art.

[0104] Probes according to the invention can be used in the hybridization, amplification, detection or sequencing techniques discussed above. Thus, some embodiments of the invention comprise probe sets (including primer sets) suitable for use in detecting, amplifying, quantitating, and/or sequencing HCGs of the invention. In some embodiments the probe sets have a certain proportion of their probes directed to HCGs (e.g., HCGs in any of Panels A-Q)—e.g., a probe set consisting of 1%, 2%, 3%, 4%, 5%, 6%, 7%, 8%, 9%, 10%, 11%, 12%, 13%, 14%, 15%, 16%, 17%, 18%, 19%, 20%, 25%, 30%, 35%, 40%, 45%, 50%, 60%, 70%, 80%, 90%, 91%, 92%, 93%, 94%, 95%, 96%, 97%, 98%, 99%, or 100% probes specific for HCGs.

[0105] The total number of genes to which the probes in the probe set are directed may vary depending on resource and technical constraints. In some embodiments the probe set comprises (or consists of or consists essentially of) probes directed to between W and X genes, where W=2, 3, 4, 5, 6, 7, 8, 9, 10, 11, 12, 13, 14, 15, 16, 17, 18, 19, 20, 21, 22, 23, 24, 25, 26, 27, 28, 29, 30, 31, 32, 33, 34, 35, 36, 37, 38, 39, 40, 41, 42, 43, 44, 45, 46, 47, 48, 49, 50, 51, 52, 53, 54, or 55 or more and X=3, 4, 5, 6, 7, 8, 9, 10, 11, 12, 13, 14, 15, 16, 17, 18, 19, 20, 25, 30, 35, 40, 45, 50, 60, 70, 80, 90, 100, 125, 150, 175, 200, 250, 300, 350, 400, 450, 500, 600, 700, 800, 900, 1,000, 1,250, 1,500, 1,750, 2,000, 2,500, 3,000, 3,500, 4,000, 5,000, 6,000, 7,000, 8,000, 9,000, 10,000, 12,000, 14,000, 16,000, 18,000, or 20,000 or more. These embodiments include every combination of W and X as set forth in the preceding sentence, where X>W. For example, the plurality of genes to which probes in the probes set are directed may comprise (or consist of or consist essentially of) a range of genes in number from any W to any X (e.g., from 10 to 15, 10 to 20, [ . . . ] 100 to 125, 100 to 150, etc.).

[0106] In some embodiments the genes to which probes in the probe set are directed will comprise at least some of the genes listed in Panels A-Q. Thus, in some embodiments the probe set comprises probes directed to at least 2, 3, 4, 5, 6, 7, 8, 9, 10, 11, 12, 13, 14, 15, 16, 17, 18, 19, 20, 21, 22, 23, 24, 25, 26, 27, 28, 29, 30, 31, 32, 33, 34, 35, 36, 37, 38, 39, 40, 41, 42, 43, 44, 45, 46, 47, 48, 49, 50, 51, 52, 53, 54, or 55 genes listed in Panels A-Q. In some embodiments the probe set comprises probes directed to between Y and Z gene of any of Panels A-Q, wherein Y=1, 2, 3, 4, 5, 6, 7, 8, 9, 10, 11, 12, 13, 14, 15, 16, 17, 18, 19, 20, 21, 22, 23, 24, 25, 26, 27, 28, 29, 30, 31, 32, 33, 34, 35, 36, 37, 38, 39, 40, 41, 42, 43, 44, 45, 46, 47, 48, 49, 50, 51, 52, 53, or 54 and Z=2, 3, 4, 5, 6, 7, 8, 9, 10, 11, 12, 13, 14, 15, 16, 17, 18, 19, 20, 21, 22, 23, 24, 25, 26, 27, 28, 29, 30, 31, 32, 33, 34, 35, 36, 37, 38, 39, 40, 41, 42, 43, 44, 45, 46, 47, 48, 49, 50, 51, 52, 53, 54, 55. In some embodiments, said plurality of genes comprises gene numbers 1 & 2, 2 & 3, 3 & 4, 4 & 5, 5 & 6, 6 & 7, 7 & 8, 8 & 9, 9 & 10, 10 & 11, 11 & 12, 12 & 13, 13 & 14, 14 & 15, 15 & 16, 16 & 17, 17 & 18, 18 & 19, 19 & 20, 20 & 21, 21 & 22, 22 & 23, 23 & 24, 24 & 25, 25 & 26, 26 & 27, 27 & 28, 28 & 29, 29 & 30, 30 & 31, 31 & 32, 32 & 33, 33 & 34, 34 & 35, 35 & 36, 36 & 37, 37 & 38, 38 & 39, 39 & 40, 40 & 41, 41 & 42, 42 & 43, 43 & 44, 44 & 45, 45 & 46, 46 & 47, 47 & 48, 48 & 49, 49 & 50, 50 & 51, 51 & 52, 52 & 53, 53 & 54, or 54 & 55 from any of Panels A-Q. These embodiments include every combination of Y and Z as set forth in the preceding sentences, where Y>Z. For example, the probe set comprises (or consists of or consists essentially of) probes directed to a range of genes with a number from any Y to any Z in any of Panels A-Q (e.g., from 1 to 2, 1 to 3, 1 to 4, [ . . . ] 1 to 55, 2 to 3, 2 to 4, 2 to 5, [ . . . ] 2 to 55, etc.).

[0107] As used herein, a probe (or primer) is “directed to” a gene when such probe hybridizes under some minimal stringency conditions (e.g., high stringency conditions) to a nucleic acid comprising a nucleotide sequence specific for such gene (e.g., in the genome essentially only found in that gene).

[0108] In another aspect of the present invention, a kit is provided for practicing the prognosis of the present invention. The kit may include a carrier for the various components of the kit. The carrier can be a container or support, in the form of, e.g., bag, box, tube, rack, and is optionally compartmentalized. The carrier may define an enclosed confinement for safety purposes during shipment and storage. The kit many include oligonucleotides directed to (e.g., specifically hybridizing under high stringency to) mRNA or cDNA of a plurality of genes in any of Panels A-Q. Such oligonucleotides can be used as PCR primers in RT-PCR reactions, or hybridization probes. In some embodiments the kit comprises reagents (e.g., probes, primers, and or antibodies) for determining the sequence of a panel of genes, where said panel comprises at least 25%, 30%, 40%, 50%, 60%, 75%, 80%, 90%, 95%, 99%, or 100% HCGs (e.g., HCGs in any of Panels A-Q). In some embodiments the kit consists of reagents (e.g., probes, primers, and or antibodies) for determining the expression level of no more than 2500 genes, wherein at least 5, 10, 15, 20, 30, 40, 50, 60, 70, 80, 90, 100, 120, 150, 200, 250, or more of these genes are HCGs (e.g., HCGs in any of Panels A-Q).

[0109] The oligonucleotides in the detection kit can be labeled with any suitable detection marker including but not limited to, radioactive isotopes, fluorephores, biotin, enzymes (e.g., alkaline phosphatase), enzyme substrates, ligands and antibodies, etc. See Jablonski et al., NUCLEIC ACIDS RES., 14:6115-6128 (1986); Nguyen et al., BIOTECHNIQUES, 13:116-123 (1992); Rigby et al., J. MOL. BIOL., 113:237-251 (1977). Alternatively, the oligonucleotides included in the kit are not labeled, and instead, one or more markers are provided in the kit so that users may label the oligonucleotides at the time of use.

[0110] Various other components useful in the detection techniques may also be included in the detection kit of this invention. Examples of such components include, but are not limited to, Taq polymerase, deoxyribonucleotides, dideoxyribonucleotides, other primers suitable for the amplification of a target DNA sequence, RNase A, and the like. In addition, the detection kit preferably includes instructions on using the kit for practice the prognosis method of the present invention using human samples.

### Example 1

[0111] Biological samples from patients that can yield germline DNA are obtained. Genomic DNA is extracted from biological samples, purified, and quantitated. Genomic regions of interest (i.e., exons of the genes of interest plus on average 10 flanking intronic nucleotides on each side of each exon) are enriched by amplification using primers specific for these regions. Genes analyzed in this example are those of Panel F.

[0112] Genomic DNA is fragmented and subjected to a merge on a RainDance instrument with a target enrichment PCR primer library. The library is designed to amplify approximately 1,200 targets covering all coding regions (plus on average 10 flanking intronic nucleotides on each side of each exon) of the genes in Panel F. Specifically, one micro-droplet at a time, the merging process melds together in an oil phase a micro-droplet containing one or more DNA fragments from the patient sample (or derived, e.g., amplified, therefrom) with a micro-droplet containing thousands of copies of one or more primer pairs targeting widely-spaced unique positions of interest (this example involves 5 primer pairs as one preferred embodiment, but 1, 2, 3, 4, 5, 6, 7, 8, 9, 10, 15, 20, 25, 30, 35, 40, 45, 50, 60, 70, 80, 90, 100 or more primer pairs may be used within a droplet). The process is repeated approximately from 1 to 2 million times. The collection of merged droplets is subjected to emulsion PCR amplification. The emulsion is disrupted, cleaned up, and subjected to secondary PCR that tails the primary PCR products with sequencing primers, anchors and an indexing barcode for the Illumina sequencing process. Samples from one or more patients are pooled together for sequencing (this example involves pooling of samples from 96 patients, but samples from 2, 3, 4, 5, 6, 7, 8, 9, 10, 15, 20, 25, 30, 35, 40, 45, 50, 60, 70, 80, 90, 100, 110, 120, 130, 140, 150, 160, 170, 180, 190, 192, 200, 225, 250, 275, 300 or more patients may be pooled).

[0113] Some genes (e.g., PMS2, CHEK2) encompass genomic areas with pseudogenes. Pseudogenes may interfere with normal sequencing. For those genes, genomic DNA is also amplified with gene-specific primers to produce long range PCR products. The long range PCR products are used as surrogate gene targets for sequencing. Specifically, the long range products are amplified with a 4-primer PCR mix containing Illumina adapter-tailed primary nested primer sets specific to the genes, as well as secondary primers containing sequencing chip anchor sequences, indexing barcodes and designed to prime off the Illumina adapter tails of the primary primers.

[0114] Amplified DNA is sequenced using the Illumina MiSeg™ (or analogous HiSeg™) system according to the manufacturer's protocol. This system yields high quality sequence data for each exon amplified.

[0115] Sequence data are compared to reference sequences using alignment software to determine whether each patient has a germline variation in any of the genes of interest. Further analysis is performed to determine whether any such variation is deleterious, including looking for nonsense and frame-shift variants or large rearrangements.

### Example 2

[0116] This Example 2 describes a study performed to assess a panel of the invention in a large population of patients suspected of having hereditary breast and ovarian cancer syndrome (HBOC), e.g., patients suspected of having a BRCA1 and/or BRCA2 mutation. The details of DNA preparation and sequencing were as described in Example 1 above, except Panel B was assessed instead of Panel F. DNA from 1955 prospectively accrued cases was anonymized for this study. Patients with Ashkenazi Jewish heritage were excluded in order to determine the relative prevalence of mutations in a generalizable population. Extracted genomic DNA from blood was hybridized with a custom amplicon library on a Raindance™ ThunderStorm™ instrument. DNA was sequenced on an Illumina™ HiSeg2500™ system. Sequence variations, large rearrangements and large deletions among the 25 genes of Panel B were detected.

[0117] A total of 275/1955 (14.07%) patients were found to be mutation carriers in at least one of the genes of Panel B. 182/1955 (9.31%) patients had a mutation in BRCA1 or BRCA2. 96/1955 (4.91%) patients had a mutation in other genes. The distribution by gene of 96 probands with other gene mutations is shown in Table A below. The genes of Table A form yet another panel of the invention (Panel P) and these genes, together with the BRCA1 and BRCA2 genes, form Panel D.

TABLE A
Panel P

| Gene | Gene | # patients with | |
|---|---|---|---|
| # | Symbol | mutation | (%) |
| 1 | CHEK2 | 30 | 31.25% |
| 2 | ATM | 14 | 14.58% |
| 3 | NBN | 14 | 14.58% |
| 4 | PALB2 | 13 | 13.54% |
| 5 | BARD1 | 7 | 7.29% |
| 6 | BRIP1 | 7 | 7.29% |
| 7 | PMS2 | 4 | 4.17% |
| 8 | MSH2 | 2 | 2.08% |
| 9 | MSH6 | 2 | 2.08% |
| 10 | TP53 | 2 | 2.08% |
| 11 | MUTYH | 1 | 1.04% |

[0118] 1738/1955 patients had a personal history of breast cancer. In 1091/1738 the incidence of breast cancer occurred prior to age 50, in 647/1738 the incidence of breast cancer occurred at or after age 50. Mutation prevalence for patients with breast cancer only, ovarian cancer only, breast and ovarian cancer or other HBOC cancers is shown in Table B below. 1902 of 1955 (97.29%) patients had a variant of uncertain clinical significance (VUS) in at least one of the genes tested with a median of three VUSs per patient.

TABLE B

| | Patients | Mutation | | | | Other Panel | |
|---|---|---|---|---|---|---|---|
| Patient Cancer History | (n) | Carriers | | BRCA1/BRCA2 | | B Gene | |
| Breast CA <50 years | 1091 | 167 | (15.31%) | 116* | (10.63%) | 51 | (4.67%) |
| Breast CA ≧50 years | 647 | 70 | (10.82%) | 40** | (6.18%) | 30 | (4.64%) |
| Ovarian CA | 162 | 23 | (14.20%) | 17 | (10.49%) | 6 | (3.70%) |
| Breast and Ovarian CA | 40 | 12 | (30.00%) | 8 | (20.00%) | 4 | (10.00%) |
| Other HBOC Cancer | 15 | 3 | (20.00%) | 1 | (6.67%) | 2 | (13.33%) |

*2 and **1 patients had an additional mutation in a non-BRCA1/2 gene.

[0119] Panel B (more specifically Panel D) increased clinical sensitivity by 4.76% (95% C.I., 2.71-6.81%) in this study sample of 1955 patients as compared to BRCA1/BRCA2 testing alone. The observed improvement in clinical sensitivity achieved over BRCA1/BRCA2 testing alone is 51.1%. Thus, among cancer patients at risk for HBOC, Panel B (more specifically Panel D) results in a greater than 50% increase in mutation detection over current BRCA1/BRCA2 clinical testing. Panel P and preferably Panel D (or subpanels comprising the top 2, 3, 4, 5, 6, 7, 8, 9, 10, 11, or 12 genes thereof) can therefore be particularly useful in targeted assessment of cancer risk in patients at risk of having HBOC.

### Example 3

[0120] This Example 3 describes a study performed to assess a panel of the invention in a population of patients suspected of having Lynch syndrome, e.g., patients submitted for testing of mismatch repair (MMR) genes (MLH1, MSH2, MSH6, PMS2, and EPCAM) based on having an indicator of Lynch syndrome. The details of DNA preparation and sequencing were as described in Example 1 above, except Panel B was assessed instead of Panel F. DNA from 343 prospectively accrued cases was anonymized for this study. Extracted genomic DNA from blood was hybridized with a custom amplicon library on a Raindance™ ThunderStorm™ instrument. DNA was sequenced on an Illumina™ HiSeg2500™ system. Sequence variations, large rearrangements and large deletions among the 25 genes of Panel B were detected.

[0121] Out of 343 cases, 45 (13%) had a mutation in MLH1, MSH2, MSH6 or PMS2. Out of 298 cases negative for these genes, other deleterious mutations were found as shown in Table C. The genes of Panel Q can be added to the MMR genes to form Panel E of the invention.

TABLE C
Panel Q

| | | | MMR mutation | |
|---|---|---|---|---|
| | | | negative cases with | |
| | | Cases w/ | other gene mutation | |
| Gene | | deleterious | | % of total |
| # | Gene Symbol | mutation | # | patients |
| 1 | BRCA2 | 6 | 6 | 1.75% |
| 2 | BRCA1 | 3 | 3 | 0.87% |
| 3 | RAD50 | 3 | 2 | 0.58% |
| 4 | BRIP1 | 2 | 2 | 0.58% |
| 5 | CHEK2 | 2 | 2 | 0.58% |
| 6 | ATM | 2 | 1 | 0.29% |
| 7 | BARD1 | 1 | 1 | 0.29% |
| 8 | MUTYH Bi-Allelic | 1 | 1 | 0.29% |
| | MUTYH Mono-Allelic | 7 | 5 | 1.46% |
| | Total excluding MYH | 20 | 18 | 5.25% |
| | mono-allelic | | | |

[0122] Panel E increased clinical sensitivity by 5.25% in this study sample of 343 patients as compared to MMR gene testing alone. The observed improvement in clinical sensitivity achieved over MMR gene testing alone is 40.4%. To better understand the contribution of BRCA1 and BRCA2 to these suspected Lynch syndrome patients, the type of cancer that was the indicator for Lynch syndrome testing in the nine BRCA1- or BRCA2-positive patients was analyzed. All nine patients had at least on indicator of Lynch syndrome. In four cases, distinct indicators for both Lynch syndrome and HBOC (i.e., indicators not shared between the syndromes) were present. In four other cases, only indicators for Lynch syndrome were present. In one case, only a shared indicator for both Lynch syndrome and HBOC (i.e., ovarian cancer) was present. Even excluding this ovarian cancer case, BRCA2 and BRCA1 alone out of Panel E increased sensitivity by 2.33% over testing only the MMR genes. This translates to an observed improvement in clinical sensitivity over MMR gene testing alone of 17.9%. Thus, among cancer patients at risk for Lynch syndrome, Panel E results in a 40% increase in mutation detection over current MMR gene testing alone. Panel Q and preferably Panel E (or subpanels comprising the top 2, 3, 4, 5, 6, 7, 8, 9, 10, or 11 genes thereof) can therefore be particularly useful in targeted assessment of cancer risk in patients at risk of having Lynch syndrome.

### Additional Embodiments

### Embodiment 1

[0123] A method for sequencing nucleic acids comprising: (1) isolating a plurality of nucleic acid molecules from a sample taken from a patient, each nucleic acid molecule comprising between A and B nucleotides in length, said plurality of nucleic acid molecules comprising one or more exons of a plurality of genes consisting of between W and X genes, and said plurality of genes comprising at least two genes in any of Panels A-Q; and (2) determining the sequence of said plurality of nucleic acid molecules.

### Embodiment 2

[0124] A method for determining whether a patient has an increased risk of cancer, which comprises: (1) determining for a plurality of genes consisting of between W and X genes, said plurality of genes comprising at least two genes in any of Panels A-Q, whether the patient has a germline deficiency in any genes in said plurality of genes; and either (2) correlating a germline deficiency in any of said plurality of genes to an increased risk of cancer, or (3) correlating the absence of a germline deficiency in all of said plurality of genes to no increased risk of cancer.

### Embodiment 3

[0125] The method of Embodiment 2 further comprising (a) isolating a plurality of nucleic acid molecules from a sample taken from a patient, each nucleic acid molecule comprising between A and B nucleotides in length, and said plurality of nucleic acid molecules comprising one or more exons of said plurality of genes and (b) determining the sequence of said plurality of nucleic acid molecules.

### Embodiment 4

[0126] The method of Embodiment 3, further comprising detecting a germline deficiency in a gene by comparing the sequence determined in (b) with one or more reference sequences.

### Embodiment 5

[0127] A method for treating a patient comprising (1) determining for a plurality of genes consisting of between W and X genes, said plurality of genes comprising at least two genes in any of Panels A-Q, whether the patient has a germline deficiency in any genes in said plurality of genes; and (2)(a) correlating a germline deficiency in any of said plurality of genes to an increased risk of cancer, or (2)(b) correlating the absence of a germline deficiency in all of said plurality of genes to no increased risk of cancer; and (3) recommending, prescribing, or administering a treatment to reduce the patient's risk of cancer.

### Embodiment 6

[0128] The method of Embodiment 5, wherein said treatment comprises surgery to remove all or part of the organ in which the patient has an increased risk of cancer.

### Embodiment 7

[0129] The method of Embodiment 6, wherein said surgery is chosen from the group consisting of mastectomy, salpingo-oophorectomy, hysterectomy, colectomy, and prostatectomy.

### Embodiment 8

[0130] The method of Embodiment 5, wherein said treatment comprises preventive drug treatment.

### Embodiment 9

[0131] The method of Embodiment 8, wherein said preventive drug treatment comprises tamoxifen treatment.

### Embodiment 10

[0132] A system comprising (1) computer program for receiving, storing, and/or retrieving a patient's sequence data for a plurality of genes consisting of between W and X genes, said plurality of genes comprising at least two genes in any of Panels A-Q; (2) computer program for querying this patient data; (3) optionally a computer program for comparing the patient's sequence data to one or more reference sequences to determine whether there is a mutation; (4) computer program for concluding whether there is an increased likelihood of cancer based on the presence or absence of a mutation; and optionally (4) computer program for outputting/displaying this conclusion.

### Embodiment 11

[0133] A system for sequencing genes in a sample, comprising: (1) a sample analyzer for sequencing a plurality of genes consisting of between W and X genes, said plurality of genes comprising at least two genes in any of Panels A-Q, wherein the sample analyzer contains (a) the sample which is from a patient, (b) genomic DNA from the sample, (c) transcript RNA from the sample, or (d) DNA synthesized from said genomic DNA; (2) a first computer program for receiving test sequence data on the plurality of genes; and (3) a second computer program for comparing the sequence data to one or more reference sequences.

### Embodiment 12

[0134] The system of Embodiment 11, comprising a computer program for determining the patient's degree of risk of cancer based at least in part on the comparison of the test sequence with said one or more reference sequences.

### Embodiment 13

[0135] The system of Embodiment 12, wherein said computer program for determining the patient's degree of risk of cancer compares the patient's determined probability of a particular cancer with a reference probability to determine whether the patient has an increased risk of such cancer.

### Embodiment 14

[0136] A composition comprising:
[0137] (a) nucleic acid probes hybridizing to a plurality of nucleic acid molecules comprising one or more exons of a plurality of genes consisting of between W and X genes, and said plurality of genes comprising at least two genes in any of Panels A-Q;
[0138] (b) nucleic acid primers and primer pairs suitable for selectively amplifying nucleic acids of (a);
[0139] (c) antibodies binding immunologically to polypeptides encoded by a plurality of genes consisting of between W and X genes, and said plurality of genes comprising at least two genes in any of Panels A-Q;
[0140] (d) a probe set comprising (a), (b) and/or (c); or
[0141] (e) a microarray comprising (a), (b), (c), and/or (d).

### Embodiment 15

[0142] A kit comprising: reagents for sequencing nucleic acid molecules comprising one or more exons of a plurality of genes comprising a plurality of genes consisting of between W and X genes, said plurality of genes comprising at least two genes in any of Panels A-Q; and instructions for using said reagents.

### Embodiment 16

[0143] The kit of Embodiment 15, comprising a composition of claim 14.

### Embodiment 17

[0144] The kit of Embodiment 15, wherein said reagents are PCR primers specific for the plurality of genes.

### Embodiment 18

[0145] The kit of Embodiment 15, wherein said reagents are PCR primers specific for the exons of the plurality of genes.

### Embodiment 19

[0146] The kit of Embodiment 15, wherein said reagents are oligonucleotide probes specific for the exons of the plurality of genes.

### Embodiment 20

[0147] The kit of Embodiment 15, wherein said reagents are packaged into an array.

### Embodiment 21

[0148] The method of any one of Embodiments 1, 3, or 4, comprising comparing the sequences determined in an earlier step with one or more reference sequences.

### Embodiment 22

[0149] The method of Embodiment 21, comprising correlating a difference between the determined sequences and the one or more reference sequences to a mutation in one or more of the genes in the plurality of genes.

### Embodiment 23

[0150] The method of Embodiment 21 or Embodiment 22, wherein the reference sequence for any given gene in the plurality is any of the sequences corresponding to that gene as shown in Table 3.

### Embodiment 24

[0151] The system of any one of Embodiments 10-13, comprising a computer program for determining whether the patient has a mutation in one or more of the genes in the plurality of genes by determining whether there is a difference between the determined sequences and the one or more reference sequences.

### Embodiment 25

[0152] The system of Embodiment 24, wherein the reference sequence for any given gene in the panel is any of the sequences corresponding to that gene as shown in Table 3.

### Embodiment 26

[0153] The method of any one of Embodiments 1-9, or 21-23, comprising correlating a germline deficiency in any particular gene in the plurality of genes to an increased risk of a particular cancer as shown in Table 4.

### Embodiment 27

[0154] The method of any one of Embodiments 1-9, 21-23, or 26, comprising diagnosing the patient with an increased risk of a particular cancer as shown in Table 4 based at least in part on a germline deficiency in any particular gene in the plurality of genes.

### Embodiment 28

[0155] The method of any one of Embodiments 1-9, 21-23, comprising correlating no germline deficiency in any gene in the plurality of genes with no increased risk of any cancer.

### Embodiment 29

[0156] The system of any one of Embodiments 10-13, comprising a computer program for determining the patient's degree of risk of any particular cancer as shown in Table 4 based at least in part on the comparison of the test sequence with said one or more reference sequences.

### Embodiment 30

[0157] The method of any of Embodiments 1, 3 or 4, wherein A=10, 11, 12, 13, 14, 15, 16, 17, 18, 19, 20, 25, 30, 35, 40, 45, 50, 60, 70, 80, 90, 100, 125, 150, 175, 200, 250, 300, 350, 400, 450, 500, 600, 700, 800, 900, 1,000, 1,250, 1,500, 1,750, 2,000, 2,500, 3,000, 3,500, 4,000, 5,000, 6,000, 7,000, 8,000, 9,000, 10,000, 12,000, 14,000, 16,000, 18,000, 20,000, 25,000, 30,000, 35,000, 40,000, 45,000, 50,000, 60,000, 70,000, 80,000, or 90,000, or more; and B=15, 16, 17, 18, 19, 20, 25, 30, 35, 40, 45, 50, 60, 70, 80, 90, 100, 125, 150, 175, 200, 250, 300, 350, 400, 450, 500, 600, 700, 800, 900, 1,000, 1,250, 1,500, 1,750, 2,000, 2,500, 3,000, 3,500, 4,000, 5,000, 6,000, 7,000, 8,000, 9,000, 10,000, 12,000, 14,000, 16,000, 18,000, 20,000, 25,000, 30,000, 35,000, 40,000, 45,000, 50,000, 60,000, 70,000, 80,000, 90,000, or 100,000 or more.

### Embodiment 31

[0158] The method of any of Embodiments 1, 3 or 4, wherein said plurality of DNA molecules comprises at least some length of intronic sequence adjacent to at least one of said one or more exons.

### Embodiment 32

[0159] The method of Embodiment 31, wherein said plurality of DNA molecules comprises at least 1, 2, 3, 4, 5, 6, 7, 8, 9, 10, 15, 20, 25, 30, 35, 40, 45, 50, 60, 70, 80, 90, 100, 200, 300, 400, 500 or more base pairs of the intronic sequence on one or both sides of the at least one exon.

### Embodiment 33

[0160] The method of any one of Embodiments 1-10, 21-23, 26-28, or 30-32, wherein W=2, 3, 4, 5, 6, 7, 8, 9, 10, 11, 12, 13, 14, 15, 16, 17, 18, 19, 20, 21, 22, 23, 24, 25, 26, 27, 28, 29, 30, 31, 32, 33, 34, 35, 36, 37, 38, 39, 40, 41, 42, 43, 44, 45, 46, 47, 48, 49, 50, 51, 52, 53, 54, 55, 56, 57, 58, 59, 60, 61, 62, 63, 64, 65, 66, 67, 68, or 69 or more; and X=3, 4, 5, 6, 7, 8, 9, 10, 11, 12, 13, 14, 15, 16, 17, 18, 19, 20, 25, 30, 35, 40, 45, 50, 60, 70, 80, 90, 100, 125, 150, 175, 200, 250, 300, 350, 400, 450, 500, 600, 700, 800, 900, 1,000, 1,250, 1,500, 1,750, 2,000, 2,500, 3,000, 3,500, 4,000, 5,000, 6,000, 7,000, 8,000, 9,000, 10,000, 12,000, 14,000, 16,000, 18,000, or 20,000 or more.

### Embodiment 34

[0161] The system of any one of Embodiments 10-13, 24, 25, or 29, wherein W=2, 3, 4, 5, 6, 7, 8, 9, 10, 11, 12, 13, 14, 15, 16, 17, 18, 19, 20, 21, 22, 23, 24, 25, 26, 27, 28, 29, 30, 31, 32, 33, 34, 35, 36, 37, 38, 39, 40, 41, 42, 43, 44, 45, 46, 47, 48, 49, 50, 51, 52, 53, 54, 55, 56, 57, 58, 59, 60, 61, 62, 63, 64, 65, 66, 67, 68, or 69 or more; and X=3, 4, 5, 6, 7, 8, 9, 10, 11, 12, 13, 14, 15, 16, 17, 18, 19, 20, 25, 30, 35, 40, 45, 50, 60, 70, 80, 90, 100, 125, 150, 175, 200, 250, 300, 350, 400, 450, 500, 600, 700, 800, 900, 1,000, 1,250, 1,500, 1,750, 2,000, 2,500, 3,000, 3,500, 4,000, 5,000, 6,000, 7,000, 8,000, 9,000, 10,000, 12,000, 14,000, 16,000, 18,000, or 20,000 or more.

### Embodiment 35

[0162] The method of any one of Embodiments 1-10, 21-23, 26-28, or 30-33, wherein said plurality of genes comprises at least 2, 3, 4, 5, 6, 7, 8, 9, 10, 11, 12, 13, 14, 15, 16, 17, 18, 19, 20, 21, 22, 23, 24, 25, 26, 27, 28, 29, 30, 31, 32, 33, 34, 35, 36, 37, 38, 39, 40, 41, 42, 43, 44, 45, 46, 47, 48, 49, 50, 51, 52, 53, 54, 55, 56, 57, 58, 59, 60, 61, 62, 63, 64, 65, 66, 67, 68, or 69 genes listed in any of Panels A-Q.

### Embodiment 36

[0163] The system of any one of Embodiments 10-13, 24, 25, 29, or 34, wherein said plurality of genes comprises at least 2, 3, 4, 5, 6, 7, 8, 9, 10, 11, 12, 13, 14, 15, 16, 17, 18, 19, 20, 21, 22, 23, 24, 25, 26, 27, 28, 29, 30, 31, 32, 33, 34, 35, 36, 37, 38, 39, 40, 41, 42, 43, 44, 45, 46, 47, 48, 49, 50, 51, 52, 53, 54, 55, 56, 57, 58, 59, 60, 61, 62, 63, 64, 65, 66, 67, 68, or 69 genes listed in any of Panels A-Q.

### Embodiment 37

[0164] The method of any one of Embodiments 1-10, 21-23, 26-28, 30-33, or 35, wherein the plurality of genes comprises gene numbers between Y and Z of any of Panels A-Q and Y=1, 2, 3, 4, 5, 6, 7, 8, 9, 10, 11, 12, 13, 14, 15, 16, 17, 18, 19, 20, 21, 22, 23, 24, 25, 26, 27, 28, 29, 30, 31, 32, 33, 34, 35, 36, 37, 38, 39, 40, 41, 42, 43, 44, 45, 46, 47, 48, 49, 50, 51, 52, 53, 54, 55, 56, 57, 58, 59, 60, 61, 62, 63, 64, 65, 66, 67 or 68 and Z=2, 3, 4, 5, 6, 7, 8, 9, 10, 11, 12, 13, 14, 15, 16, 17, 18, 19, 20, 21, 22, 23, 24, 25, 26, 27, 28, 29, 30, 31, 32, 33, 34, 35, 36, 37, 38, 39, 40, 41, 42, 43, 44, 45, 46, 47, 48, 49, 50, 51, 52, 53, 54, 55, 56, 57, 58, 59, 60, 61, 62, 63, 64, 65, 66, 67, 68, or 69.

### Embodiment 38

[0165] The method of any one of Embodiments 1-10, 21-23, 26-28, 30-33, 35, or 37, wherein said plurality of genes comprises gene numbers 1 & 2, 2 & 3, 3 & 4, 4 & 5, 5 & 6, 6 & 7, 7 & 8, 8 & 9, 9 & 10, 10 & 11, 11 & 12, 12 & 13, 13 & 14, 14 & 15, 15 & 16, 16 & 17, 17 & 18, 18 & 19, 19 & 20, 20 & 21, 21 & 22, 22 & 23, 23 & 24, 24 & 25, 25 & 26, 26 & 27, 27 & 28, 28 & 29, 29 & 30, 30 & 31, 31 & 32, 32 & 33, 33 & 34, 34 & 35, 35 & 36, 36 & 37, 37 & 38, 38 & 39, 39 & 40, 40 & 41, 41 & 42, 42 & 43, 43 & 44, 44 & 45, 45 & 46, 46 & 47, 47 & 48, 48 & 49, 49 & 50, 50 & 51, 51 & 52, 52 & 53, 53 & 54, 54 & 55, 55 & 56, 56 & 57, 57 & 58, 58 & 59, 59 & 60, 60 & 61, 61 & 62, 62 & 63, 63 & 64, 64 & 65, 65 & 66, 66 & 67, 67 & 68, or 68 & 69 of any of Panels A-Q.

### Embodiment 39

[0166] The method of any one of Embodiments 1-10, 21-23, 26-28, 30-33, 35, or 37-38, wherein the genes chosen from Panels A-Q comprise at least 1%, 2%, 3%, 4%, 5%, 6%, 7%, 8%, 9%, 10%, 11%, 12%, 13%, 14%, 15%, 16%, 17%, 18%, 19%, 20%, 25%, 30%, 35%, 40%, 45%, 50%, 60%, 70%, 80%, 90%, 91%, 92%, 93%, 94%, 95%, 96%, 97%, 98%, 99%, or 100%, of the plurality of genes to be analyzed.

### Embodiment 40

[0167] The system of any one of Embodiments 10-13, 24, 25, 29, 34, or 36, wherein said plurality of genes comprises at least 2, 3, 4, 5, 6, 7, 8, 9, 10, 11, 12, 13, 14, 15, 16, 17, 18, 19, 20, 21, 22, 23, 24, 25, 26, 27, 28, 29, 30, 31, 32, 33, 34, 35, 36, 37, 38, 39, 40, 41, 42, 43, 44, 45, 46, 47, 48, 49, 50, 51, 52, 53, 54, 55, 56, 57, 58, 59, 60, 61, 62, 63, 64, 65, 66, 67, 68, or 69 genes listed in any of Panels A-Q.

### Embodiment 41

[0168] The system of any one of Embodiments 10-13, 24, 25, 29, 34, 36, or 40, wherein the plurality of genes comprises gene numbers between Y and Z of any of Panels A-Q and Y=1, 2, 3, 4, 5, 6, 7, 8, 9, 10, 11, 12, 13, 14, 15, 16, 17, 18, 19, 20, 21, 22, 23, 24, 25, 26, 27, 28, 29, 30, 31, 32, 33, 34, 35, 36, 37, 38, 39, 40, 41, 42, 43, 44, 45, 46, 47, 48, 49, 50, 51, 52, 53, 54, 55, 56, 57, 58, 59, 60, 61, 62, 63, 64, 65, 66, 67 or 68 and Z=2, 3, 4, 5, 6, 7, 8, 9, 10, 11, 12, 13, 14, 15, 16, 17, 18, 19, 20, 21, 22, 23, 24, 25, 26, 27, 28, 29, 30, 31, 32, 33, 34, 35, 36, 37, 38, 39, 40, 41, 42, 43, 44, 45, 46, 47, 48, 49, 50, 51, 52, 53, 54, 55, 56, 57, 58, 59, 60, 61, 62, 63, 64, 65, 66, 67, 68, or 69.

### Embodiment 42

[0169] The system of any one of Embodiments 10-13, 24, 25, 29, 34, 36, or 40-41, wherein said plurality of genes comprises gene numbers 1 & 2, 2 & 3, 3 & 4, 4 & 5, 5 & 6, 6 & 7, 7 & 8, 8 & 9, 9 & 10, 10 & 11, 11 & 12, 12 & 13, 13 & 14, 14 & 15, 15 & 16, 16 & 17, 17 & 18, 18 & 19, 19 & 20, 20 & 21, 21 & 22, 22 & 23, 23 & 24, 24 & 25, 25 & 26, 26 & 27, 27 & 28, 28 & 29, 29 & 30, 30 & 31, 31 & 32, 32 & 33, 33 & 34, 34 & 35, 35 & 36, 36 & 37, 37 & 38, 38 & 39, 39 & 40, 40 & 41, 41 & 42, 42 & 43, 43 & 44, 44 & 45, 45 & 46, 46 & 47, 47 & 48, 48 & 49, 49 & 50, 50 & 51, 51 & 52, 52 & 53, 53 & 54, 54 & 55, 55 & 56, 56 & 57, 57 & 58, 58 & 59, 59 & 60, 60 & 61, 61 & 62, 62 & 63, 63 & 64, 64 & 65, 65 & 66, 66 & 67, 67 & 68, or 68 & 69 of any of Panels A-Q.

### Embodiment 43

[0170] The system of any one of Embodiments 10-13, 24, 25, 29, 34, 36, or 40-42, wherein the genes chosen from Panels A-Q comprise at least 1%, 2%, 3%, 4%, 5%, 6%, 7%, 8%, 9%, 10%, 11%, 12%, 13%, 14%, 15%, 16%, 17%, 18%, 19%, 20%, 25%, 30%, 35%, 40%, 45%, 50%, 60%, 70%, 80%, 90%, 91%, 92%, 93%, 94%, 95%, 96%, 97%, 98%, 99%, or 100%, of the plurality of genes to be analyzed.

[0171] All publications and patent applications mentioned in the specification are indicative of the level of those skilled in the art to which this invention pertains. All publications and patent applications are herein incorporated by reference to the same extent as if each individual publication or patent application was specifically and individually indicated to be incorporated by reference. The mere mentioning of the publications and patent applications does not necessarily constitute an admission that they are prior art to the instant application.

[0172] Although the foregoing invention has been described in some detail by way of illustration and example for purposes of clarity of understanding, it will be obvious that certain changes and modifications may be practiced within the scope of the appended claims.

The application's sequence listing, which the Patent Office published only in electronic form, follows.

SEQUENCE LISTING (602 sequences)

SEQ ID NO: 1 - DNA, 10814 bp, Homo sapiens
agtcttcccacctcccacaagatggcggagggcaagtagcaagggggcggggtgtggccgccggaagcctagccgctgctcgggggggacctgcgggctcaggcccgggagctgcggaccgaggttggctcgatgctgttcccaggtactgttgttggctgttggtgaggaaggtgaagcactcagttgccttctcgggcctcggcgccccctatgtacgcctccctgggctcgggtccggtcgcccctttgcccgcttctgtaccaccctcagttctcgggtcctggagcaccggcggcagcaggagctgcgtccggcaggagacgaagagcccgggcggcgctcgtacttctggccactgggcgagcgtctggcaggaagtacttaaacaactacaaggaagtattgaagatgaagctatggcttcttctggacagattgatttattagagcgtcttaaagagcttaacttagatagcagtaatttccctggagtaaaactgcggtcaaaaatgtccctccgttcttatggaagccgggaaggatctgtatcaagccgttctggagagtgcagtcctgttcctatgggttcatttccaagaagagggtttgtaaatggaagcagagaaagtactggatatttagaagaacttgagaaagagaggtcattgcttcttgctgatcttgacaaagaagaaaaggaaaaagactggtattacgctcaacttcagaatctcactaaaagaatagatagtcttcctttaactgaaaatttttccttacaaacagatatgaccagaaggcaattggaatatgaagcaaggcaaatcagagttgcgatggaagaacaactaggtacctgccaggatatggaaaaacgagcacagaggtcatctcagaacaagcatgaaaccggctcacatgatgctgagcggcagaatgaaggtcaaggagtgggagaaatcaacatggcaacttctggtaatggtcagggttcaactacacgaatggaccatgaaacagccagtgttttgagttctagtagcacacactctgcacctcgaaggctgacaagtcatctgggaaccaaggtggaaatggtgtattcattgttgtcaatgcttggtactcatgataaggatgatatgtcgcgaactttgctagctatgtctagctcccaagacagctgtatatccatgcgacagtctggatgtcttcctctcctcatccagcttttacatggcaatgacaaagactctgtattgttgggaaattcccggggcagtaaagaggctcgggccagggccagtgcagcactccacaacatcattcactcacagcctgatgacaagagaggcaggcgtgaaatccgagtccttcatcttttggaacagatacgcgcttactgtgaaacctgttgggagtggcaggaagctcatgaaccaggcatggaccaggacaaaaatccaatgccagctcctgttgaacatcagatctgtcctgctgtgtgtgttctaatgaaactttcatttgatgaagagcatagacatgcaatgaatgaactagggggactacaggccattgcagaattattgcaagtggactgtgaaatgtatgggcttactaatgaccactacagtattacactaagacgatatgctggaatggctttgacaaacttgacttttggagatgtagccaacaaggctacgctatgctctatgaaaggctgcatgagagcacttgtggcccaactaaaatctgaaagtgaagacttacagcaggttattgcgagtgttttgaggaatttgtcttggcgagcagatgtaaatagtaaaaagacgttgcgagaagttggaagtgtgaaagcattgatggaatgtgctttagaagttaaaaaggaatcaaccctcaaaagcgtattgagtgccttatggaatttgtcagcacattgcactgagaataaagctgatatatgtgctgtagatggtgcacttgcatttttggttggcactcttacttaccggagccagacaaacactttagccattattgaaagtggaggtgggatattacggaatgtgtccagcttgatagctacaaatgaggaccacaggcaaatcctaagagagaacaactgtctacaaactttattacaacacttaaaatctcatagtttgacaatagtcagtaatgcatgtggaactttgtggaatctctcagcaagaaatcctaaagaccaggaagcattatgggacatgggggcagttagcatgctcaagaacctcattcattcaaagcacaaaatgattgctatgggaagtgctgcagctttaaggaatctcatggcaaataggcctgcgaagtacaaggatgccaatattatgtctcctggctcaagcttgccatctcttcatgttaggaaacaaaaagccctagaagcagaattagatgctcagcacttatcagaaacttttgacaatatagacaatttaagtcccaaggcatctcatcgtagtaagcagagacacaagcaaagtctctatggtgattatgtttttgacaccaatcgacatgatgataataggtcagacaattttaatactggcaacatgactgtcctttcaccatatttgaatactacagtgttacccagctcctcttcatcaagaggaagcttagatagttctcgttctgaaaaagatagaagtttggagagagaacgcggaattggtctaggcaactaccatccagcaacagaaaatccaggaacttcttcaaagcgaggtttgcagatctccaccactgcagcccagattgccaaagtcatggaagaagtgtcagccattcatacctctcaggaagacagaagttctgggtctaccactgaattacattgtgtgacagatgagagaaatgcacttagaagaagctctgctgcccatacacattcaaacacttacaatttcactaagtcggaaaattcaaataggacatgttctatgccttatgccaaattagaatacaagagatcttcaaatgatagtttaaatagtgtcagtagtagtgatggttatggtaaaagaggtcaaatgaaaccctcgattgaatcctattctgaagatgatgaaagtaagttttgcagttatggtcaatacccagccgacctagcccataaaatacatagtgcaaatcatatggatgataatgatggagaactagatacaccaataaattatagtcttaaatattcagatgagcagttgaactctggaaggcaaagtccttcacagaatgaaagatgggcaagacccaaacacataatagaagatgaaataaaacaaagtgagcaaagacaatcaaggaatcaaagtacaacttatcctgtttatactgagagcactgatgataaacacctcaagttccaaccacattttggacagcaggaatgtgtttctccatacaggtcacggggagccaatggttcagaaacaaatcgagtgggttctaatcatggaattaatcaaaatgtaagccagtctttgtgtcaagaagatgactatgaagatgataagcctaccaattatagtgaacgttactctgaagaagaacagcatgaagaagaagagagaccaacaaattatagcataaaatataatgaagagaaacgtcatgtggatcagcctattgattatagtttaaaatatgccacagatattccttcatcacagaaacagtcattttcattctcaaagagttcatctggacaaagcagtaaaaccgaacatatgtcttcaagcagtgagaatacgtccacaccttcatctaatgccaagaggcagaatcagctccatccaagttctgcacagagtagaagtggtcagcctcaaaaggctgccacttgcaaagtttcttctattaaccaagaaacaatacagacttattgtgtagaagatactccaatatgtttttcaagatgtagttcattatcatctttgtcatcagctgaagatgaaataggatgtaatcagacgacacaggaagcagattctgctaataccctgcaaatagcagaaataaaagaaaagattggaactaggtcagctgaagatcctgtgagcgaagttccagcagtgtcacagcaccctagaaccaaatccagcagactgcagggttctagtttatcttcagaatcagccaggcacaaagctgttgaattttcttcaggagcgaaatctccctccaaaagtggtgctcagacacccaaaagtccacctgaacactatgttcaggagaccccactcatgtttagcagatgtacttctgtcagttcacttgatagttttgagagtcgttcgattgccagctccgttcagagtgaaccatgcagtggaatggtaagtggcattataagccccagtgatcttccagatagccctggacaaaccatgccaccaagcagaagtaaaacacctccaccacctcctcaaacagctcaaaccaagcgagaagtacctaaaaataaagcacctactgctgaaaagagagagagtggacctaagcaagctgcagtaaatgctgcagttcagagggtccaggttcttccagatgctgatactttattacattttgccacggaaagtactccagatggattttcttgttcatccagcctgagtgctctgagcctcgatgagccatttatacagaaagatgtggaattaagaataatgcctccagttcaggaaaatgacaatgggaatgaaacagaatcagagcagcctaaagaatcaaatgaaaaccaagagaaagaggcagaaaaaactattgattctgaaaaggacctattagatgattcagatgatgatgatattgaaatactagaagaatgtattatttctgccatgccaacaaagtcatcacgtaaagcaaaaaagccagcccagactgcttcaaaattacctccacctgtggcaaggaaaccaagtcagctgcctgtgtacaaacttctaccatcacaaaacaggttgcaaccccaaaagcatgttagttttacaccgggggatgatatgccacgggtgtattgtgttgaagggacacctataaacttttccacagctacatctctaagtgatctaacaatcgaatcccctccaaatgagttagctgctggagaaggagttagaggaggggcacagtcaggtgaatttgaaaaacgagataccattcctacagaaggcagaagtacagatgaggctcaaggaggaaaaacctcatctgtaaccatacctgaattggatgacaataaagcagaggaaggtgatattcttgcagaatgcattaattctgctatgcccaaagggaaaagtcacaagcctttccgtgtgaaaaagataatggaccaggtccagcaagcatctgcgtcttcttctgcacccaacaaaaatcagttagatggtaagaaaaagaaaccaacttcaccagtaaaacctataccacaaaatactgaatataggacacgtgtaagaaaaaatgcagactcaaaaaataatttaaatgctgagagagttttctcagacaacaaagattcaaagaaacagaatttgaaaaataattccaaggtcttcaatgataagctcccaaataatgaagatagagtcagaggaagttttgcttttgattcacctcatcattacacgcctattgaaggaactccttactgtttttcacgaaatgattctttgagttctctagattttgatgatgatgatgttgacctttccagggaaaaggctgaattaagaaaggcaaaagaaaataaggaatcagaggctaaagttaccagccacacagaactaacctccaaccaacaatcagctaataagacacaagctattgcaaagcagccaataaatcgaggtcagcctaaacccatacttcagaaacaatccacttttccccagtcatccaaagacataccagacagaggggcagcaactgatgaaaagttacagaattttgctattgaaaatactccggtttgcttttctcataattcctctctgagttctctcagtgacattgaccaagaaaacaacaataaagaaaatgaacctatcaaagagactgagccccctgactcacagggagaaccaagtaaacctcaagcatcaggctatgctcctaaatcatttcatgttgaagataccccagtttgtttctcaagaaacagttctctcagttctcttagtattgactctgaagatgacctgttgcaggaatgtataagctccgcaatgccaaaaaagaaaaagccttcaagactcaagggtgataatgaaaaacatagtcccagaaatatgggtggcatattaggtgaagatctgacacttgatttgaaagatatacagagaccagattcagaacatggtctatcccctgattcagaaaattttgattggaaagctattcaggaaggtgcaaattccatagtaagtagtttacatcaagctgctgctgctgcatgtttatctagacaagcttcgtctgattcagattccatcctttccctgaaatcaggaatctctctgggatcaccatttcatcttacacctgatcaagaagaaaaaccctttacaagtaataaaggcccacgaattctaaaaccaggggagaaaagtacattggaaactaaaaagatagaatctgaaagtaaaggaatcaaaggaggaaaaaaagtttataaaagtttgattactggaaaagttcgatctaattcagaaatttcaggccaaatgaaacagccccttcaagcaaacatgccttcaatctctcgaggcaggacaatgattcatattccaggagttcgaaatagctcctcaagtacaagtcctgtttctaaaaaaggcccaccccttaagactccagcctccaaaagccctagtgaaggtcaaacagccaccacttctcctagaggagccaagccatctgtgaaatcagaattaagccctgttgccaggcagacatcccaaataggtgggtcaagtaaagcaccttctagatcaggatctagagattcgaccccttcaagacctgcccagcaaccattaagtagacctatacagtctcctggccgaaactcaatttcccctggtagaaatggaataagtcctcctaacaaattatctcaacttccaaggacatcatcccctagtactgcttcaactaagtcctcaggttctggaaaaatgtcatatacatctccaggtagacagatgagccaacagaaccttaccaaacaaacaggtttatccaagaatgccagtagtattccaagaagtgagtctgcctccaaaggactaaatcagatgaataatggtaatggagccaataaaaaggtagaactttctagaatgtcttcaactaaatcaagtggaagtgaatctgatagatcagaaagacctgtattagtacgccagtcaactttcatcaaagaagctccaagcccaaccttaagaagaaaattggaggaatctgcttcatttgaatctctttctccatcatctagaccagcttctcccactaggtcccaggcacaaactccagttttaagtccttcccttcctgatatgtctctatccacacattcgtctgttcaggctggtggatggcgaaaactcccacctaatctcagtcccactatagagtataatgatggaagaccagcaaagcgccatgatattgcacggtctcattctgaaagtccttctagacttccaatcaataggtcaggaacctggaaacgtgagcacagcaaacattcatcatcccttcctcgagtaagcacttggagaagaactggaagttcatcttcaattctttctgcttcatcagaatccagtgaaaaagcaaaaagtgaggatgaaaaacatgtgaactctatttcaggaaccaaacaaagtaaagaaaaccaagtatccgcaaaaggaacatggagaaaaataaaagaaaatgaattttctcccacaaatagtacttctcagaccgtttcctcaggtgctacaaatggtgctgaatcaaagactctaatttatcaaatggcacctgctgtttctaaaacagaggatgtttgggtgagaattgaggactgtcccattaacaatcctagatctggaagatctcccacaggtaatactcccccggtgattgacagtgtttcagaaaaggcaaatccaaacattaaagattcaaaagataatcaggcaaaacaaaatgtgggtaatggcagtgttcccatgcgtaccgtgggtttggaaaatcgcctgaactcctttattcaggtggatgcccctgaccaaaaaggaactgagataaaaccaggacaaaataatcctgtccctgtatcagagactaatgaaagttctatagtggaacgtaccccattcagttctagcagctcaagcaaacacagttcacctagtgggactgttgctgccagagtgactccttttaattacaacccaagccctaggaaaagcagcgcagatagcacttcagctcggccatctcagatcccaactccagtgaataacaacacaaagaagcgagattccaaaactgacagcacagaatccagtggaacccaaagtcctaagcgccattctgggtcttaccttgtgacatctgtttaaaagagaggaagaatgaaactaagaaaattctatgttaattacaactgctatatagacattttgtttcaaatgaaactttaaaagactgaaaaattttgtaaataggtttgattcttgttagagggtttttgttctggaagccatatttgatagtatactttgtcttcactggtcttattttgggaggcactcttgatggttaggaaaaaaatagtaaagccaagtatgtttgtacagtatgttttacatgtatttaaagtagcatcccatcccaacttcctttaattattgcttgtcttaaaataatgaacactacagatagaaaatatgatatattgctgttatcaatcatttctagattataaactgactaaacttacatcagggaaaaattggtatttatgcaaaaaaaaatgtttttgtccttgtgagtccatctaacatcataattaatcatgtggctgtgaaattcacagtaatatggttcccgatgaacaagtttacccagcctgctttgctttactgcatgaatgaaactgatggttcaatttcagaagtaatgattaacagttatgtggtcacatgatgtgcatagagatagctacagtgtaataatttacactattttgtgctccaaacaaaacaaaaatctgtgtaactgtaaaacattgaatgaaactattttacctgaactagattttatctgaaagtaggtagaatttttgctatgctgtaatttgttgtatattctggtatttgaggtgagatggctgctcttttattaatgagacatgaattgtgtctcaacagaaactaaatgaacatttcagaataaattattgctgtatgtaaactgttactgaaattggtatttgtttgaagggtcttgtttcacatttgtattaataattgtttaaaatgcctcttttaaaagcttatataaatttttttcttcagcttctatgcattaagagtaaaattcctcttactgtaataaaaacaattgaagaagactgttgccacttaaccattccatgcgttggcacttatctattcctgaaatttcttttatgtgattagctcatcttgatttttaatatttttccacttaaacttttttttcttactccactggagctcagtaaaagtaaattcatgtaatagcaatgcaagcagcctagcacagactaagcattgagcataataggcccacataatttcctctttcttaatattatagaattctgtacttgaaattgattcttagacattgcagtctcttcgaggctttacagtgtaaactgtcttgccccttcatcttcttgttgcaactgggtctgacatgaacactttttatcaccctgtatgttagggcaagatctcagcagtgaagtataatcagcactttgccatgctcagaaaattcaaatcacatggaactttagaggtagatttaatacgattaagatattcagaagtatattttagaatccctgcctgttaaggaaactttatttgtggtaggtacagttctggggtacatgttaagtgtccccttatacagtggagggaagtcttccttcctgaaggaaaataaactgacacttattaactaagataatttacttaatatatcttccctgatttgttttaaaagatcagagggtgactgatgatacatgcatacatatttgttgaataaatgaaaatttatttttagtgataagattcatacactctgtatttggggagggaaaacctttttaagcatggtggggcactcagataggagtgaatacacctacctggtgccttgaaaatcacatcaagtagttaattatctaccccttacctgtgtttataacttccaggtaatgagaatgattttttttaaagctaaaatgccagtaaataaaagtgctatgacttgagctaagatatttgactccaatgcctgtactgtgtctactgcaccactttgtaaacacttcaatttactatctttgaaatgattgacctttaaatttttgccaaatgttatctgaaattgtctatgaataccatctacttctgttgttttcccaggcttccataaacaatggagatacatgcaaaaaaaaaaa

SEQ ID NO: 2 - DNA, 10848 bp, Homo sapiens
gtattggtgcagcccgccagggtgtcactggagacagaatggaggtgctgccggactcggaaatggggacacatgcattggtggccaaaagagagaggagacaaaaccgctgcagatggctgatgtgaatctagtggaaagagctactggggatgagagaaagaggaggaggcaggtccaagggtagccaaggatggctgcagcttcatatgatcagttgttaaagcaagttgaggcactgaagatggagaactcaaatcttcgacaagagctagaagataattccaatcatcttacaaaactggaaactgaggcatctaatatgaaggaagtacttaaacaactacaaggaagtattgaagatgaagctatggcttcttctggacagattgatttattagagcgtcttaaagagcttaacttagatagcagtaatttccctggagtaaaactgcggtcaaaaatgtccctccgttcttatggaagccgggaaggatctgtatcaagccgttctggagagtgcagtcctgttcctatgggttcatttccaagaagagggtttgtaaatggaagcagagaaagtactggatatttagaagaacttgagaaagagaggtcattgcttcttgctgatcttgacaaagaagaaaaggaaaaagactggtattacgctcaacttcagaatctcactaaaagaatagatagtcttcctttaactgaaaatttttccttacaaacagatatgaccagaaggcaattggaatatgaagcaaggcaaatcagagttgcgatggaagaacaactaggtacctgccaggatatggaaaaacgagcacagcgaagaatagccagaattcagcaaatcgaaaaggacatacttcgtatacgacagcttttacagtcccaagcaacagaagcagagaggtcatctcagaacaagcatgaaaccggctcacatgatgctgagcggcagaatgaaggtcaaggagtgggagaaatcaacatggcaacttctggtaatggtcagggttcaactacacgaatggaccatgaaacagccagtgttttgagttctagtagcacacactctgcacctcgaaggctgacaagtcatctgggaaccaaggtggaaatggtgtattcattgttgtcaatgcttggtactcatgataaggatgatatgtcgcgaactttgctagctatgtctagctcccaagacagctgtatatccatgcgacagtctggatgtcttcctctcctcatccagcttttacatggcaatgacaaagactctgtattgttgggaaattcccggggcagtaaagaggctcgggccagggccagtgcagcactccacaacatcattcactcacagcctgatgacaagagaggcaggcgtgaaatccgagtccttcatcttttggaacagatacgcgcttactgtgaaacctgttgggagtggcaggaagctcatgaaccaggcatggaccaggacaaaaatccaatgccagctcctgttgaacatcagatctgtcctgctgtgtgtgttctaatgaaactttcatttgatgaagagcatagacatgcaatgaatgaactagggggactacaggccattgcagaattattgcaagtggactgtgaaatgtatgggcttactaatgaccactacagtattacactaagacgatatgctggaatggctttgacaaacttgacttttggagatgtagccaacaaggctacgctatgctctatgaaaggctgcatgagagcacttgtggcccaactaaaatctgaaagtgaagacttacagcaggttattgcgagtgttttgaggaatttgtcttggcgagcagatgtaaatagtaaaaagacgttgcgagaagttggaagtgtgaaagcattgatggaatgtgctttagaagttaaaaaggaatcaaccctcaaaagcgtattgagtgccttatggaatttgtcagcacattgcactgagaataaagctgatatatgtgctgtagatggtgcacttgcatttttggttggcactcttacttaccggagccagacaaacactttagccattattgaaagtggaggtgggatattacggaatgtgtccagcttgatagctacaaatgaggaccacaggcaaatcctaagagagaacaactgtctacaaactttattacaacacttaaaatctcatagtttgacaatagtcagtaatgcatgtggaactttgtggaatctctcagcaagaaatcctaaagaccaggaagcattatgggacatgggggcagttagcatgctcaagaacctcattcattcaaagcacaaaatgattgctatgggaagtgctgcagctttaaggaatctcatggcaaataggcctgcgaagtacaaggatgccaatattatgtctcctggctcaagcttgccatctcttcatgttaggaaacaaaaagccctagaagcagaattagatgctcagcacttatcagaaacttttgacaatatagacaatttaagtcccaaggcatctcatcgtagtaagcagagacacaagcaaagtctctatggtgattatgtttttgacaccaatcgacatgatgataataggtcagacaattttaatactggcaacatgactgtcctttcaccatatttgaatactacagtgttacccagctcctcttcatcaagaggaagcttagatagttctcgttctgaaaaagatagaagtttggagagagaacgcggaattggtctaggcaactaccatccagcaacagaaaatccaggaacttcttcaaagcgaggtttgcagatctccaccactgcagcccagattgccaaagtcatggaagaagtgtcagccattcatacctctcaggaagacagaagttctgggtctaccactgaattacattgtgtgacagatgagagaaatgcacttagaagaagctctgctgcccatacacattcaaacacttacaatttcactaagtcggaaaattcaaataggacatgttctatgccttatgccaaattagaatacaagagatcttcaaatgatagtttaaatagtgtcagtagtagtgatggttatggtaaaagaggtcaaatgaaaccctcgattgaatcctattctgaagatgatgaaagtaagttttgcagttatggtcaatacccagccgacctagcccataaaatacatagtgcaaatcatatggatgataatgatggagaactagatacaccaataaattatagtcttaaatattcagatgagcagttgaactctggaaggcaaagtccttcacagaatgaaagatgggcaagacccaaacacataatagaagatgaaataaaacaaagtgagcaaagacaatcaaggaatcaaagtacaacttatcctgtttatactgagagcactgatgataaacacctcaagttccaaccacattttggacagcaggaatgtgtttctccatacaggtcacggggagccaatggttcagaaacaaatcgagtgggttctaatcatggaattaatcaaaatgtaagccagtctttgtgtcaagaagatgactatgaagatgataagcctaccaattatagtgaacgttactctgaagaagaacagcatgaagaagaagagagaccaacaaattatagcataaaatataatgaagagaaacgtcatgtggatcagcctattgattatagtttaaaatatgccacagatattccttcatcacagaaacagtcattttcattctcaaagagttcatctggacaaagcagtaaaaccgaacatatgtcttcaagcagtgagaatacgtccacaccttcatctaatgccaagaggcagaatcagctccatccaagttctgcacagagtagaagtggtcagcctcaaaaggctgccacttgcaaagtttcttctattaaccaagaaacaatacagacttattgtgtagaagatactccaatatgtttttcaagatgtagttcattatcatctttgtcatcagctgaagatgaaataggatgtaatcagacgacacaggaagcagattctgctaataccctgcaaatagcagaaataaaagaaaagattggaactaggtcagctgaagatcctgtgagcgaagttccagcagtgtcacagcaccctagaaccaaatccagcagactgcagggttctagtttatcttcagaatcagccaggcacaaagctgttgaattttcttcaggagcgaaatctccctccaaaagtggtgctcagacacccaaaagtccacctgaacactatgttcaggagaccccactcatgtttagcagatgtacttctgtcagttcacttgatagttttgagagtcgttcgattgccagctccgttcagagtgaaccatgcagtggaatggtaagtggcattataagccccagtgatcttccagatagccctggacaaaccatgccaccaagcagaagtaaaacacctccaccacctcctcaaacagctcaaaccaagcgagaagtacctaaaaataaagcacctactgctgaaaagagagagagtggacctaagcaagctgcagtaaatgctgcagttcagagggtccaggttcttccagatgctgatactttattacattttgccacggaaagtactccagatggattttcttgttcatccagcctgagtgctctgagcctcgatgagccatttatacagaaagatgtggaattaagaataatgcctccagttcaggaaaatgacaatgggaatgaaacagaatcagagcagcctaaagaatcaaatgaaaaccaagagaaagaggcagaaaaaactattgattctgaaaaggacctattagatgattcagatgatgatgatattgaaatactagaagaatgtattatttctgccatgccaacaaagtcatcacgtaaagcaaaaaagccagcccagactgcttcaaaattacctccacctgtggcaaggaaaccaagtcagctgcctgtgtacaaacttctaccatcacaaaacaggttgcaaccccaaaagcatgttagttttacaccgggggatgatatgccacgggtgtattgtgttgaagggacacctataaacttttccacagctacatctctaagtgatctaacaatcgaatcccctccaaatgagttagctgctggagaaggagttagaggaggggcacagtcaggtgaatttgaaaaacgagataccattcctacagaaggcagaagtacagatgaggctcaaggaggaaaaacctcatctgtaaccatacctgaattggatgacaataaagcagaggaaggtgatattcttgcagaatgcattaattctgctatgcccaaagggaaaagtcacaagcctttccgtgtgaaaaagataatggaccaggtccagcaagcatctgcgtcttcttctgcacccaacaaaaatcagttagatggtaagaaaaagaaaccaacttcaccagtaaaacctataccacaaaatactgaatataggacacgtgtaagaaaaaatgcagactcaaaaaataatttaaatgctgagagagttttctcagacaacaaagattcaaagaaacagaatttgaaaaataattccaaggtcttcaatgataagctcccaaataatgaagatagagtcagaggaagttttgcttttgattcacctcatcattacacgcctattgaaggaactccttactgtttttcacgaaatgattctttgagttctctagattttgatgatgatgatgttgacctttccagggaaaaggctgaattaagaaaggcaaaagaaaataaggaatcagaggctaaagttaccagccacacagaactaacctccaaccaacaatcagctaataagacacaagctattgcaaagcagccaataaatcgaggtcagcctaaacccatacttcagaaacaatccacttttccccagtcatccaaagacataccagacagaggggcagcaactgatgaaaagttacagaattttgctattgaaaatactccggtttgcttttctcataattcctctctgagttctctcagtgacattgaccaagaaaacaacaataaagaaaatgaacctatcaaagagactgagccccctgactcacagggagaaccaagtaaacctcaagcatcaggctatgctcctaaatcatttcatgttgaagataccccagtttgtttctcaagaaacagttctctcagttctcttagtattgactctgaagatgacctgttgcaggaatgtataagctccgcaatgccaaaaaagaaaaagccttcaagactcaagggtgataatgaaaaacatagtcccagaaatatgggtggcatattaggtgaagatctgacacttgatttgaaagatatacagagaccagattcagaacatggtctatcccctgattcagaaaattttgattggaaagctattcaggaaggtgcaaattccatagtaagtagtttacatcaagctgctgctgctgcatgtttatctagacaagcttcgtctgattcagattccatcctttccctgaaatcaggaatctctctgggatcaccatttcatcttacacctgatcaagaagaaaaaccctttacaagtaataaaggcccacgaattctaaaaccaggggagaaaagtacattggaaactaaaaagatagaatctgaaagtaaaggaatcaaaggaggaaaaaaagtttataaaagtttgattactggaaaagttcgatctaattcagaaatttcaggccaaatgaaacagccccttcaagcaaacatgccttcaatctctcgaggcaggacaatgattcatattccaggagttcgaaatagctcctcaagtacaagtcctgtttctaaaaaaggcccaccccttaagactccagcctccaaaagccctagtgaaggtcaaacagccaccacttctcctagaggagccaagccatctgtgaaatcagaattaagccctgttgccaggcagacatcccaaataggtgggtcaagtaaagcaccttctagatcaggatctagagattcgaccccttcaagacctgcccagcaaccattaagtagacctatacagtctcctggccgaaactcaatttcccctggtagaaatggaataagtcctcctaacaaattatctcaacttccaaggacatcatcccctagtactgcttcaactaagtcctcaggttctggaaaaatgtcatatacatctccaggtagacagatgagccaacagaaccttaccaaacaaacaggtttatccaagaatgccagtagtattccaagaagtgagtctgcctccaaaggactaaatcagatgaataatggtaatggagccaataaaaaggtagaactttctagaatgtcttcaactaaatcaagtggaagtgaatctgatagatcagaaagacctgtattagtacgccagtcaactttcatcaaagaagctccaagcccaaccttaagaagaaaattggaggaatctgcttcatttgaatctctttctccatcatctagaccagcttctcccactaggtcccaggcacaaactccagttttaagtccttcccttcctgatatgtctctatccacacattcgtctgttcaggctggtggatggcgaaaactcccacctaatctcagtcccactatagagtataatgatggaagaccagcaaagcgccatgatattgcacggtctcattctgaaagtccttctagacttccaatcaataggtcaggaacctggaaacgtgagcacagcaaacattcatcatcccttcctcgagtaagcacttggagaagaactggaagttcatcttcaattctttctgcttcatcagaatccagtgaaaaagcaaaaagtgaggatgaaaaacatgtgaactctatttcaggaaccaaacaaagtaaagaaaaccaagtatccgcaaaaggaacatggagaaaaataaaagaaaatgaattttctcccacaaatagtacttctcagaccgtttcctcaggtgctacaaatggtgctgaatcaaagactctaatttatcaaatggcacctgctgtttctaaaacagaggatgtttgggtgagaattgaggactgtcccattaacaatcctagatctggaagatctcccacaggtaatactcccccggtgattgacagtgtttcagaaaaggcaaatccaaacattaaagattcaaaagataatcaggcaaaacaaaatgtgggtaatggcagtgttcccatgcgtaccgtgggtttggaaaatcgcctgaactcctttattcaggtggatgcccctgaccaaaaaggaactgagataaaaccaggacaaaataatcctgtccctgtatcagagactaatgaaagttctatagtggaacgtaccccattcagttctagcagctcaagcaaacacagttcacctagtgggactgttgctgccagagtgactccttttaattacaacccaagccctaggaaaagcagcgcagatagcacttcagctcggccatctcagatcccaactccagtgaataacaacacaaagaagcgagattccaaaactgacagcacagaatccagtggaacccaaagtcctaagcgccattctgggtcttaccttgtgacatctgtttaaaagagaggaagaatgaaactaagaaaattctatgttaattacaactgctatatagacattttgtttcaaatgaaactttaaaagactgaaaaattttgtaaataggtttgattcttgttagagggtttttgttctggaagccatatttgatagtatactttgtcttcactggtcttattttgggaggcactcttgatggttaggaaaaaaatagtaaagccaagtatgtttgtacagtatgttttacatgtatttaaagtagcatcccatcccaacttcctttaattattgcttgtcttaaaataatgaacactacagatagaaaatatgatatattgctgttatcaatcatttctagattataaactgactaaacttacatcagggaaaaattggtatttatgcaaaaaaaaatgtttttgtccttgtgagtccatctaacatcataattaatcatgtggctgtgaaattcacagtaatatggttcccgatgaacaagtttacccagcctgctttgctttactgcatgaatgaaactgatggttcaatttcagaagtaatgattaacagttatgtggtcacatgatgtgcatagagatagctacagtgtaataatttacactattttgtgctccaaacaaaacaaaaatctgtgtaactgtaaaacattgaatgaaactattttacctgaactagattttatctgaaagtaggtagaatttttgctatgctgtaatttgttgtatattctggtatttgaggtgagatggctgctcttttattaatgagacatgaattgtgtctcaacagaaactaaatgaacatttcagaataaattattgctgtatgtaaactgttactgaaattggtatttgtttgaagggtcttgtttcacatttgtattaataattgtttaaaatgcctcttttaaaagcttatataaatttttttcttcagcttctatgcattaagagtaaaattcctcttactgtaataaaaacaattgaagaagactgttgccacttaaccattccatgcgttggcacttatctattcctgaaatttcttttatgtgattagctcatcttgatttttaatatttttccacttaaacttttttttcttactccactggagctcagtaaaagtaaattcatgtaatagcaatgcaagcagcctagcacagactaagcattgagcataataggcccacataatttcctctttcttaatattatagaattctgtacttgaaattgattcttagacattgcagtctcttcgaggctttacagtgtaaactgtcttgccccttcatcttcttgttgcaactgggtctgacatgaacactttttatcaccctgtatgttagggcaagatctcagcagtgaagtataatcagcactttgccatgctcagaaaattcaaatcacatggaactttagaggtagatttaatacgattaagatattcagaagtatattttagaatccctgcctgttaaggaaactttatttgtggtaggtacagttctggggtacatgttaagtgtccccttatacagtggagggaagtcttccttcctgaaggaaaataaactgacacttattaactaagataatttacttaatatatcttccctgatttgttttaaaagatcagagggtgactgatgatacatgcatacatatttgttgaataaatgaaaatttatttttagtgataagattcatacactctgtatttggggagggaaaacctttttaagcatggtggggcactcagataggagtgaatacacctacctggtgccttgaaaatcacatcaagtagttaattatctaccccttacctgtgtttataacttccaggtaatgagaatgattttttttaaagctaaaatgccagtaaataaaagtgctatgacttgagctaagatatttgactccaatgcctgtactgtgtctactgcaccactttgtaaacacttcaatttactatctttgaaatgattgacctttaaatttttgccaaatgttatctgaaattgtctatgaataccatctacttctgttgttttcccaggcttccataaacaatggagatacatgcaaaaaaaaaaa

SEQ ID NO: 3 - DNA, 10740 bp, Homo sapiens
gtattggtgcagcccgccagggtgtcactggagacagaatggaggtgctgccggactcggaaatggggtccaagggtagccaaggatggctgcagcttcatatgatcagttgttaaagcaagttgaggcactgaagatggagaactcaaatcttcgacaagagctagaagataattccaatcatcttacaaaactggaaactgaggcatctaatatgaaggaagtacttaaacaactacaaggaagtattgaagatgaagctatggcttcttctggacagattgatttattagagcgtcttaaagagcttaacttagatagcagtaatttccctggagtaaaactgcggtcaaaaatgtccctccgttcttatggaagccgggaaggatctgtatcaagccgttctggagagtgcagtcctgttcctatgggttcatttccaagaagagggtttgtaaatggaagcagagaaagtactggatatttagaagaacttgagaaagagaggtcattgcttcttgctgatcttgacaaagaagaaaaggaaaaagactggtattacgctcaacttcagaatctcactaaaagaatagatagtcttcctttaactgaaaatttttccttacaaacagatatgaccagaaggcaattggaatatgaagcaaggcaaatcagagttgcgatggaagaacaactaggtacctgccaggatatggaaaaacgagcacagcgaagaatagccagaattcagcaaatcgaaaaggacatacttcgtatacgacagcttttacagtcccaagcaacagaagcagagaggtcatctcagaacaagcatgaaaccggctcacatgatgctgagcggcagaatgaaggtcaaggagtgggagaaatcaacatggcaacttctggtaatggtcagggttcaactacacgaatggaccatgaaacagccagtgttttgagttctagtagcacacactctgcacctcgaaggctgacaagtcatctgggaaccaaggtggaaatggtgtattcattgttgtcaatgcttggtactcatgataaggatgatatgtcgcgaactttgctagctatgtctagctcccaagacagctgtatatccatgcgacagtctggatgtcttcctctcctcatccagcttttacatggcaatgacaaagactctgtattgttgggaaattcccggggcagtaaagaggctcgggccagggccagtgcagcactccacaacatcattcactcacagcctgatgacaagagaggcaggcgtgaaatccgagtccttcatcttttggaacagatacgcgcttactgtgaaacctgttgggagtggcaggaagctcatgaaccaggcatggaccaggacaaaaatccaatgccagctcctgttgaacatcagatctgtcctgctgtgtgtgttctaatgaaactttcatttgatgaagagcatagacatgcaatgaatgaactagggggactacaggccattgcagaattattgcaagtggactgtgaaatgtatgggcttactaatgaccactacagtattacactaagacgatatgctggaatggctttgacaaacttgacttttggagatgtagccaacaaggctacgctatgctctatgaaaggctgcatgagagcacttgtggcccaactaaaatctgaaagtgaagacttacagcaggttattgcgagtgttttgaggaatttgtcttggcgagcagatgtaaatagtaaaaagacgttgcgagaagttggaagtgtgaaagcattgatggaatgtgctttagaagttaaaaaggaatcaaccctcaaaagcgtattgagtgccttatggaatttgtcagcacattgcactgagaataaagctgatatatgtgctgtagatggtgcacttgcatttttggttggcactcttacttaccggagccagacaaacactttagccattattgaaagtggaggtgggatattacggaatgtgtccagcttgatagctacaaatgaggaccacaggcaaatcctaagagagaacaactgtctacaaactttattacaacacttaaaatctcatagtttgacaatagtcagtaatgcatgtggaactttgtggaatctctcagcaagaaatcctaaagaccaggaagcattatgggacatgggggcagttagcatgctcaagaacctcattcattcaaagcacaaaatgattgctatgggaagtgctgcagctttaaggaatctcatggcaaataggcctgcgaagtacaaggatgccaatattatgtctcctggctcaagcttgccatctcttcatgttaggaaacaaaaagccctagaagcagaattagatgctcagcacttatcagaaacttttgacaatatagacaatttaagtcccaaggcatctcatcgtagtaagcagagacacaagcaaagtctctatggtgattatgtttttgacaccaatcgacatgatgataataggtcagacaattttaatactggcaacatgactgtcctttcaccatatttgaatactacagtgttacccagctcctcttcatcaagaggaagcttagatagttctcgttctgaaaaagatagaagtttggagagagaacgcggaattggtctaggcaactaccatccagcaacagaaaatccaggaacttcttcaaagcgaggtttgcagatctccaccactgcagcccagattgccaaagtcatggaagaagtgtcagccattcatacctctcaggaagacagaagttctgggtctaccactgaattacattgtgtgacagatgagagaaatgcacttagaagaagctctgctgcccatacacattcaaacacttacaatttcactaagtcggaaaattcaaataggacatgttctatgccttatgccaaattagaatacaagagatcttcaaatgatagtttaaatagtgtcagtagtagtgatggttatggtaaaagaggtcaaatgaaaccctcgattgaatcctattctgaagatgatgaaagtaagttttgcagttatggtcaatacccagccgacctagcccataaaatacatagtgcaaatcatatggatgataatgatggagaactagatacaccaataaattatagtcttaaatattcagatgagcagttgaactctggaaggcaaagtccttcacagaatgaaagatgggcaagacccaaacacataatagaagatgaaataaaacaaagtgagcaaagacaatcaaggaatcaaagtacaacttatcctgtttatactgagagcactgatgataaacacctcaagttccaaccacattttggacagcaggaatgtgtttctccatacaggtcacggggagccaatggttcagaaacaaatcgagtgggttctaatcatggaattaatcaaaatgtaagccagtctttgtgtcaagaagatgactatgaagatgataagcctaccaattatagtgaacgttactctgaagaagaacagcatgaagaagaagagagaccaacaaattatagcataaaatataatgaagagaaacgtcatgtggatcagcctattgattatagtttaaaatatgccacagatattccttcatcacagaaacagtcattttcattctcaaagagttcatctggacaaagcagtaaaaccgaacatatgtcttcaagcagtgagaatacgtccacaccttcatctaatgccaagaggcagaatcagctccatccaagttctgcacagagtagaagtggtcagcctcaaaaggctgccacttgcaaagtttcttctattaaccaagaaacaatacagacttattgtgtagaagatactccaatatgtttttcaagatgtagttcattatcatctttgtcatcagctgaagatgaaataggatgtaatcagacgacacaggaagcagattctgctaataccctgcaaatagcagaaataaaagaaaagattggaactaggtcagctgaagatcctgtgagcgaagttccagcagtgtcacagcaccctagaaccaaatccagcagactgcagggttctagtttatcttcagaatcagccaggcacaaagctgttgaattttcttcaggagcgaaatctccctccaaaagtggtgctcagacacccaaaagtccacctgaacactatgttcaggagaccccactcatgtttagcagatgtacttctgtcagttcacttgatagttttgagagtcgttcgattgccagctccgttcagagtgaaccatgcagtggaatggtaagtggcattataagccccagtgatcttccagatagccctggacaaaccatgccaccaagcagaagtaaaacacctccaccacctcctcaaacagctcaaaccaagcgagaagtacctaaaaataaagcacctactgctgaaaagagagagagtggacctaagcaagctgcagtaaatgctgcagttcagagggtccaggttcttccagatgctgatactttattacattttgccacggaaagtactccagatggattttcttgttcatccagcctgagtgctctgagcctcgatgagccatttatacagaaagatgtggaattaagaataatgcctccagttcaggaaaatgacaatgggaatgaaacagaatcagagcagcctaaagaatcaaatgaaaaccaagagaaagaggcagaaaaaactattgattctgaaaaggacctattagatgattcagatgatgatgatattgaaatactagaagaatgtattatttctgccatgccaacaaagtcatcacgtaaagcaaaaaagccagcccagactgcttcaaaattacctccacctgtggcaaggaaaccaagtcagctgcctgtgtacaaacttctaccatcacaaaacaggttgcaaccccaaaagcatgttagttttacaccgggggatgatatgccacgggtgtattgtgttgaagggacacctataaacttttccacagctacatctctaagtgatctaacaatcgaatcccctccaaatgagttagctgctggagaaggagttagaggaggggcacagtcaggtgaatttgaaaaacgagataccattcctacagaaggcagaagtacagatgaggctcaaggaggaaaaacctcatctgtaaccatacctgaattggatgacaataaagcagaggaaggtgatattcttgcagaatgcattaattctgctatgcccaaagggaaaagtcacaagcctttccgtgtgaaaaagataatggaccaggtccagcaagcatctgcgtcttcttctgcacccaacaaaaatcagttagatggtaagaaaaagaaaccaacttcaccagtaaaacctataccacaaaatactgaatataggacacgtgtaagaaaaaatgcagactcaaaaaataatttaaatgctgagagagttttctcagacaacaaagattcaaagaaacagaatttgaaaaataattccaaggtcttcaatgataagctcccaaataatgaagatagagtcagaggaagttttgcttttgattcacctcatcattacacgcctattgaaggaactccttactgtttttcacgaaatgattctttgagttctctagattttgatgatgatgatgttgacctttccagggaaaaggctgaattaagaaaggcaaaagaaaataaggaatcagaggctaaagttaccagccacacagaactaacctccaaccaacaatcagctaataagacacaagctattgcaaagcagccaataaatcgaggtcagcctaaacccatacttcagaaacaatccacttttccccagtcatccaaagacataccagacagaggggcagcaactgatgaaaagttacagaattttgctattgaaaatactccggtttgcttttctcataattcctctctgagttctctcagtgacattgaccaagaaaacaacaataaagaaaatgaacctatcaaagagactgagccccctgactcacagggagaaccaagtaaacctcaagcatcaggctatgctcctaaatcatttcatgttgaagataccccagtttgtttctcaagaaacagttctctcagttctcttagtattgactctgaagatgacctgttgcaggaatgtataagctccgcaatgccaaaaaagaaaaagccttcaagactcaagggtgataatgaaaaacatagtcccagaaatatgggtggcatattaggtgaagatctgacacttgatttgaaagatatacagagaccagattcagaacatggtctatcccctgattcagaaaattttgattggaaagctattcaggaaggtgcaaattccatagtaagtagtttacatcaagctgctgctgctgcatgtttatctagacaagcttcgtctgattcagattccatcctttccctgaaatcaggaatctctctgggatcaccatttcatcttacacctgatcaagaagaaaaaccctttacaagtaataaaggcccacgaattctaaaaccaggggagaaaagtacattggaaactaaaaagatagaatctgaaagtaaaggaatcaaaggaggaaaaaaagtttataaaagtttgattactggaaaagttcgatctaattcagaaatttcaggccaaatgaaacagccccttcaagcaaacatgccttcaatctctcgaggcaggacaatgattcatattccaggagttcgaaatagctcctcaagtacaagtcctgtttctaaaaaaggcccaccccttaagactccagcctccaaaagccctagtgaaggtcaaacagccaccacttctcctagaggagccaagccatctgtgaaatcagaattaagccctgttgccaggcagacatcccaaataggtgggtcaagtaaagcaccttctagatcaggatctagagattcgaccccttcaagacctgcccagcaaccattaagtagacctatacagtctcctggccgaaactcaatttcccctggtagaaatggaataagtcctcctaacaaattatctcaacttccaaggacatcatcccctagtactgcttcaactaagtcctcaggttctggaaaaatgtcatatacatctccaggtagacagatgagccaacagaaccttaccaaacaaacaggtttatccaagaatgccagtagtattccaagaagtgagtctgcctccaaaggactaaatcagatgaataatggtaatggagccaataaaaaggtagaactttctagaatgtcttcaactaaatcaagtggaagtgaatctgatagatcagaaagacctgtattagtacgccagtcaactttcatcaaagaagctccaagcccaaccttaagaagaaaattggaggaatctgcttcatttgaatctctttctccatcatctagaccagcttctcccactaggtcccaggcacaaactccagttttaagtccttcccttcctgatatgtctctatccacacattcgtctgttcaggctggtggatggcgaaaactcccacctaatctcagtcccactatagagtataatgatggaagaccagcaaagcgccatgatattgcacggtctcattctgaaagtccttctagacttccaatcaataggtcaggaacctggaaacgtgagcacagcaaacattcatcatcccttcctcgagtaagcacttggagaagaactggaagttcatcttcaattctttctgcttcatcagaatccagtgaaaaagcaaaaagtgaggatgaaaaacatgtgaactctatttcaggaaccaaacaaagtaaagaaaaccaagtatccgcaaaaggaacatggagaaaaataaaagaaaatgaattttctcccacaaatagtacttctcagaccgtttcctcaggtgctacaaatggtgctgaatcaaagactctaatttatcaaatggcacctgctgtttctaaaacagaggatgtttgggtgagaattgaggactgtcccattaacaatcctagatctggaagatctcccacaggtaatactcccccggtgattgacagtgtttcagaaaaggcaaatccaaacattaaagattcaaaagataatcaggcaaaacaaaatgtgggtaatggcagtgttcccatgcgtaccgtgggtttggaaaatcgcctgaactcctttattcaggtggatgcccctgaccaaaaaggaactgagataaaaccaggacaaaataatcctgtccctgtatcagagactaatgaaagttctatagtggaacgtaccccattcagttctagcagctcaagcaaacacagttcacctagtgggactgttgctgccagagtgactccttttaattacaacccaagccctaggaaaagcagcgcagatagcacttcagctcggccatctcagatcccaactccagtgaataacaacacaaagaagcgagattccaaaactgacagcacagaatccagtggaacccaaagtcctaagcgccattctgggtcttaccttgtgacatctgtttaaaagagaggaagaatgaaactaagaaaattctatgttaattacaactgctatatagacattttgtttcaaatgaaactttaaaagactgaaaaattttgtaaataggtttgattcttgttagagggtttttgttctggaagccatatttgatagtatactttgtcttcactggtcttattttgggaggcactcttgatggttaggaaaaaaatagtaaagccaagtatgtttgtacagtatgttttacatgtatttaaagtagcatcccatcccaacttcctttaattattgcttgtcttaaaataatgaacactacagatagaaaatatgatatattgctgttatcaatcatttctagattataaactgactaaacttacatcagggaaaaattggtatttatgcaaaaaaaaatgtttttgtccttgtgagtccatctaacatcataattaatcatgtggctgtgaaattcacagtaatatggttcccgatgaacaagtttacccagcctgctttgctttactgcatgaatgaaactgatggttcaatttcagaagtaatgattaacagttatgtggtcacatgatgtgcatagagatagctacagtgtaataatttacactattttgtgctccaaacaaaacaaaaatctgtgtaactgtaaaacattgaatgaaactattttacctgaactagattttatctgaaagtaggtagaatttttgctatgctgtaatttgttgtatattctggtatttgaggtgagatggctgctcttttattaatgagacatgaattgtgtctcaacagaaactaaatgaacatttcagaataaattattgctgtatgtaaactgttactgaaattggtatttgtttgaagggtcttgtttcacatttgtattaataattgtttaaaatgcctcttttaaaagcttatataaatttttttcttcagcttctatgcattaagagtaaaattcctcttactgtaataaaaacaattgaagaagactgttgccacttaaccattccatgcgttggcacttatctattcctgaaatttcttttatgtgattagctcatcttgatttttaatatttttccacttaaacttttttttcttactccactggagctcagtaaaagtaaattcatgtaatagcaatgcaagcagcctagcacagactaagcattgagcataataggcccacataatttcctctttcttaatattatagaattctgtacttgaaattgattcttagacattgcagtctcttcgaggctttacagtgtaaactgtcttgccccttcatcttcttgttgcaactgggtctgacatgaacactttttatcaccctgtatgttagggcaagatctcagcagtgaagtataatcagcactttgccatgctcagaaaattcaaatcacatggaactttagaggtagatttaatacgattaagatattcagaagtatattttagaatccctgcctgttaaggaaactttatttgtggtaggtacagttctggggtacatgttaagtgtccccttatacagtggagggaagtcttccttcctgaaggaaaataaactgacacttattaactaagataatttacttaatatatcttccctgatttgttttaaaagatcagagggtgactgatgatacatgcatacatatttgttgaataaatgaaaatttatttttagtgataagattcatacactctgtatttggggagggaaaacctttttaagcatggtggggcactcagataggagtgaatacacctacctggtgccttgaaaatcacatcaagtagttaattatctaccccttacctgtgtttataacttccaggtaatgagaatgattttttttaaagctaaaatgccagtaaataaaagtgctatgacttgagctaagatatttgactccaatgcctgtactgtgtctactgcaccactttgtaaacacttcaatttactatctttgaaatgattgacctttaaatttttgccaaatgttatctgaaattgtctatgaataccatctacttctgttgttttcccaggcttccataaacaatggagatacatgcaaaaaaaaaaa

SEQ ID NO: 4 - DNA, 1500 bp, Homo sapiens
tgaataaaatccaacttcttaccatgacctggaggccctacctgatttggcctctgcctaccccgaccacatctccttcccactgtccatgtcacctattctttctgtccctctttcatgtcagacttgctaccacctcaggatctgttctgttgttccctctgtctgaaagcttttgccccagatcttccagtggctcctgggcccccatggtcagtcaggcttcagattaaatgtcaactctggagaaagatcactaatcaccacctctcactgtccatcatctttctgtgtggtttgctctcttcctatcccttatcaccatcaaacattcttttgttgactgtcttttattgtctattctttcacactagaatgtaagttccgtgagtttattgtatttcctattgctgtaaatctagagcctgaaacagtatctagtatatatcggaaacccaaatgatattgttcaattaatgttgaatgaaatgaaactgaagaggtaatccaaggtaaagaacttatcaaactgtgtgagacaaacaaggatttcccggaagaggtgtttttaaattaaaactacagggtggtagtgagaggtggtagggaagcagaggtcgcagctacaaaataataacttgctcatctccgtttctccgctatcttatgagcccttgtggggctgggacagaattttattcatctttctatcatcagcgtctagtacggggagtagcaaatagtgagcactcgatagatgtttgcggaataatggactagtgtgtgcagaaggatctattaactgggctgcagcacaattcagagaaggccagtaagtgctgcaactgagactcggctgcctaggcagcaatggctcacgggacagaacagcgaagcagtgcccggcaagcggagcgcagcacccattgcgcctgcgcataacaggctctagtctccgggctgtgggaagccagcaacacctctcacgcatgcgcattgtagtcttcccacctcccacaagatggcggagggcaagtagcaagggggcggggtgtggccgccggaagcctagccgctgctcgggggggacctgcgggctcaggcccgggagctgcggaccgaggttggctcgatgctgttcccaggtactgttgttggctgttggtgaggaaggtgaagcactcagttgccttctcgggcctcggcgccccctatgtacgcctccctgggctcgggtccggtcgcccctttgcccgcttctgtaccaccctcagttctcgggtcctggagcaccggcggcagcaggagctgcgtccggcaggagacgaagagcccgggcggcgctcgtacttctggccactgggcgagcgtctggcaggtgagtgaggctgcaggcattgacgtctcctcccggcaaagcttcctcggctttgccccgccgctgctcgggaccctacggtgctcggcccgactctgtggctctcttctctccatgtctca

SEQ ID NO: 5 - DNA, 1378 bp, Homo sapiens
aggtaatccaaggtaaagaacttatcaaactgtgtgagacaaacaaggatttcccggaagaggtgtttttaaattaaaactacagggtggtagtgagaggtggtagggaagcagaggtcgcagctacaaaataataacttgctcatctccgtttctccgctatcttatgagcccttgtggggctgggacagaattttattcatctttctatcatcagcgtctagtacggggagtagcaaatagtgagcactcgatagatgtttgcggaataatggactagtgtgtgcagaaggatctattaactgggctgcagcacaattcagagaaggccagtaagtgctgcaactgagactcggctgcctaggcagcaatggctcacgggacagaacagcgaagcagtgcccggcaagcggagcgcagcacccattgcgcctgcgcataacaggctctagtctccgggctgtgggaagccagcaacacctctcacgcatgcgcattgtagtcttcccacctcccacaagatggcggagggcaagtagcaagggggcggggtgtggccgccggaagcctagccgctgctcgggggggacctgcgggctcaggcccgggagctgcggaccgaggttggctcgatgctgttcccaggtactgttgttggctgttggtgaggaaggtgaagcactcagttgccttctcgggcctcggcgccccctatgtacgcctccctgggctcgggtccggtcgcccctttgcccgcttctgtaccaccctcagttctcgggtcctggagcaccggcggcagcaggagctgcgtccggcaggagacgaagagcccgggcggcgctcgtacttctggccactgggcgagcgtctggcaggtgagtgaggctgcaggcattgacgtctcctcccggcaaagcttcctcggctttgccccgccgctgctcgggaccctacggtgctcggcccgactctgtggctctcttctctccatgtctcaccctctcccctccccgcactccccattcaggcctccagttggcccctggctttgcaggtcctccattctcacgcagtggatgggggtcgcgacgcccgccgtcctccacctttcctggctgctgctggagcttcgcccctgcaagtggtgccccattcgcgttaggtgggtgggtcgtccgcccttcccattttagtcgcttccccatcttcctcgtttggaccctcttgcttcctctaaaagttttaaactctctgcctgggaaaatacctgatagcccggcatgtggagttacaaagaaagggctgttatccaaaggccggtgaattttgttcactttgatgggagaatcaagtccccaggagccttggatggtta

SEQ ID NO: 6 - DNA, 1085 bp, Homo sapiens
atgctaattgtaaattagtatactagcagaatatacttaaatgtggtatataaaagcttgaatgttgaagttgttaaatagattatgtgttaatttggtgttttttatggtcatgttggtgcacgcttaagagacatggattctaaacacataagtagcttttgtaacttgagcaagtctctgggtctcacttgttttatctgaaaaatgagaataatttgcattgttggtttttaggtttgaaataatgaatgtatcttaaatgtgtttctaataccttgcacagagactccccataatcaccattatctcaaaatatcactattattatttggccatgatttatttattaataatgaataataggtaatatatataaggtgcgtgctttgagagtgatctgaatttttttctcagcatacttaaatgtcaagaaatacagaatcatgtcttgaagttatttagaatttcatgttaatatattgtgttctttttaacaggaagtacttaaacaactacaaggaagtattgaagatgaagctatggcttcttctggacagattgatttattagagcgtcttaaaggtagattttaaaaaggtgttttaaaataattttttaagctcaaattgtcatctttaggtgtgtagatccaagtacagcttctctcgatttgggtgttggtatcagttttcttggtatgttagccttaccctcaggatgtaattgttaaagtacaaataaataaaaaatgtatttgtgtgtcatttcttcagttaaacatttaactggctttgaatgaactattttaaatccctcccttaaataattttcggctctttgtaaagcttgttgctattctgccagtcactaaatagggctttagtattctatatgccatagacttgagcctactgtttcattggaagaagtattgtcttcttcattcaggatagaaatactttaaccttttcacatatataagttgattataattcatttttagcagttttaaaaggatatctttctcattctgttgcttgaaaattccagtgtcagaacagagaaagtgcttgataataatt

SEQ ID NO: 7 - DNA, 1202 bp, Homo sapiens
ccagtcactaaatagggctttagtattctatatgccatagacttgagcctactgtttcattggaagaagtattgtcttcttcattcaggatagaaatactttaaccttttcacatatataagttgattataattcatttttagcagttttaaaaggatatctttctcattctgttgcttgaaaattccagtgtcagaacagagaaagtgcttgataataattgaagccagacagagaaattacttttggattctaaaatattatttagaggaagtctaaggaagtacattttatctaattttcctttaacacactccttatttttaccctgacccaagtggacttttcagggaaagtcctaaataatttttgttttcagtcatgtatatttgtggttaaaatgtaaacctaatatttcactttaaaataatataacattaagaatattttagactgcttaaagcaattgttgtataaaaacttgtttctattttatttagagcttaacttagatagcagtaatttccctggagtaaaactgcggtcaaaaatgtccctccgttcttatggaagccgggaaggatctgtatcaagccgttctggagagtgcagtcctgttcctatgggttcatttccaagaagagggtttgtaaatggaagcagagaaagtactggatatttagaagaacttgagaaagagaggtaacttttcttcatatagtaaacattgccttgtgtactccagtttattgttattttgtaatataatatttaaattgtgaatttatagtaggtgatagctaacacttagagcattttgcatttttaaactcaaagatagcatgttattgattgcacttacattaaatctaaaaatataaacaaggccgtttcctgggattctgaagacctattttgtcacttattttgtttttttgtttgttttttggggtttattttgagacagggtgtcactgtgtctcccaggctggagtgtagtggcatgatctcggctcactgcaacctccacctcctgggttcaagcggttcttgtgcctcagccacccaagtagctgaaactatagacgcctaccaccacgcctggctaatttttgtatttttggtagagacggggtttcttcatgttggccaagctggttatcacttaaatactttgactactctgtacattgagtaataca

SEQ ID NO: 8 - DNA, 1109 bp, Homo sapiens
taacttcctcttatttcaaaatgacagtatatttcttattattttggctgctgtgaagctgaaagccacatcagtgtccaaagtaatagcttcttatattctgggtttgttttctgggcatcattgctgcttttcttatttcctttactatactttttattcttatattaattttgagttttgttatatgtgtatcttttacctatcattatattcttagactataaatatgaagaaagcctttggtgaagtgtaagtattcttttaaggatgattaccagtttatttagaaaaaaagttctttttaatactctaattttaatgactgtaatattctaagtcctacctttaaaaattgaaatcaatgtaaattttttgagtaattcattattagcactttaggtagagaagtttgcaataacaactgatgtaagtattgctcttctgcagtctttattagcattgtttaaacgtacctttttttaaaaaaaaaaaaataggtcattgcttcttgctgatcttgacaaagaagaaaaggaaaaagactggtattacgctcaacttcagaatctcactaaaagaatagatagtcttcctttaactgaaaatgtaagtaacttggcagtacaacttatttgaaactttaataacttgatattttaaagtacctaggtaatccattaaaattcaggataactgaatttatagttatttgtaaattgcaatatgttttacccaactttaggcctgaatatataatagttaatgaatttttgttggtaaagatgataaaactttattgtgctcaaatgttttatttaaagctcttatttagaaaatctataaagtttgaattctagaggacctcagggttcaactaggcaactagttttttaactccgtgtattgaattgccaaacatactctatagaaatatttatcaccatctgcctattttttgtactgtgttgcaggaatcatgccaaatagtttttgcaataaaaatatctctgaaaatattctagatataaatgccaatagctatagcacggatattagcatttttgcaagcactaaagctggtttgttttgtccaccagtattcacaa

SEQ ID NO: 9 - DNA, 1114 bp, Homo sapiens
catattcctcatttgattaatgaaaaagttctctcaacttaatctgtatgtatatggtaatccttaccttaagttgaagtatgagcttaagaatgatggacttgtttcttgatatttctatgttgtccacgttaatatgctagtatttaataattaaaagtagtgcctcttcagtagagaagagtcataaggcaactgaatttaacctcactctaactggaccaattatatattttaagtgaaataggccaatctaattaaagccacttgtgactttggcaaataagtgtttgaattccacgtcacatcagggatccagattgagtctgacacctataatcaaatttaaacactccttggagtaaaaaataattttctcatgcaccatgactgacgtatttgcttattcattttctttattggttcttatatgcttttttgcttttactgattaacgtaaatacaagatattgatacttttttattatttgtggttttagttttccttacaaacagatatgaccagaaggcaattggaatatgaagcaaggcaaatcagagttgcgatggaagaacaactaggtacctgccaggatatggaaaaacgagcacaggtaagttacttgtttctaagtgataaaacagcgaagagctattaggaataaaatgaattacagctctgttaatattgattaaattttattaaagacataaggctgtgtttattttggctctatttcaaaataagatttatcatggctgctgagcaacataatcaatattcacatagttgtgtctttaccatattcatttcccctggtactgttctgttctgccttggaattataagggagagacagagttagatggtggtcttccggtagctaatgactagcttcagttctcctttgaaatttttacttcttgtaatcttagactgtataaaggcattcagaacatgtcactgctcttcaaattgtgcacttaaaaaaccctcattcaaggataataggaaggaaacaaagagaattttaggagagatgaagtaagttgtatggagaacattcccatatttctaccctcaatgtcaagaaagagtattagctagctttgc

SEQ ID NO: 10 - DNA, 1105 bp, Homo sapiens
cagaagctaagagcctatcattttatttcacctaacttttattagaagatatacatatatatatatatattctatgtgaaaatatacctaagtagaagatatttgtaagcttaggtaatagtttaactgttgtatttgcagctccattaaatgtcagaatcatgtgtccttgcagaaaagatagttatttgttctacttgggttatgttcctgatagtaatgtgagcgcagctggtagaggatggcattcctgtgagtctcagaaaatcctttgtctcgtgcagctctaatgctcaagggacacacttcactttccccttaccgagatagtcgaccgccaatcgtactggaggttatgaagtgtaatacacagttccatgcctttatcagtctgtataattgatgcattcagagctttaaagcaaaaaaagaaaaaaagccttgggctaagaaagcctacaccatttttgcatgtactgatgttaactccatcttaacagaggtcatctcagaacaagcatgaaaccggctcacatgatgctgagcggcagaatgaaggtcaaggagtgggagaaatcaacatggcaacttctggtaatggtcaggtaaataaattattttatcatattttttaaaattatttaaatatcagaaaagtatgaagcaagatggttctaagaatgatctataaatcttacctattttcttagtcctgaatgcatatttccagaagcattcagtaccaatgtgctgtcatttctctttattatatcagcaataatgctgtaaggattttctagatctatttctatagctatagattgtgtgtttatgttttagtctaaaatgattgtgagtagttttttttaataactctaagctgcattttgattatgtatatgatttgacctagttatttttgcttgccttgaataggtttgctctttcactaagaccttcaatgtaaagacatttttatggttttttttaaagttataaaggctttatttcctgttgtacttaaagattatataaatctagaaatccaagtcttactgaaaaagataattgtaatgcacacaaaaaagtaaggcaacatggccta

SEQ ID NO: 11 - DNA, 1099 bp, Homo sapiens
ggtgtttatattatactgcactgcagtcatttattttttcatgtctttgtccagtaaaagttttaaacagccctttctaaactgtgagatcttagagaacttggactgtagcaaattcatacttagttttctggcaatttggagcatttcagaatttgaacattccttcaatgcttttcatcaatgaacttatctgaatgtggttttatttatttagatctatgaaaaattactaccctagaatttcttcagtctttggttaagtccattctgcagtttaatgctcatatgcaagaaactctcttttctttagtttttctctaaaacatacttagtaagcgtataggtaaaaaatattttgaacagttataatggtcatacttttatgatgtatttaattgtttatcatacagacacttcatttggagtaccttaacatgatgttatctgtatttacctatagtctaaattataccatctataatgtgcttaatttttagggttcaactacacgaatggaccatgaaacagccagtgttttgagttctagtagcacacactctgcacctcgaaggctgacaagtcatctgggaaccaaggtaacagaagattacaaaccctggtcactaatgccatgactactttgctaagacattcttggccaggtgcagtggctcacacctgtaatcccagcattttgggaggccaaggcaggtggatcacttgaggccaggagttcaagaccagcctgggcaacgtggcaaaaccccatctctactaaaaatacaaaaatttagccagtgtggtggcacacacctgtggtcccagctactcaggaggctgaggcatgagaatagttggaacccaggaggcagaggttgcagtgagctgagattacaccgctttctagtggagaattctgattcacagtctcttgaagaaattacatatttttatacaacgaagcataaacaagggaaaaatcaggtttataaaaagtgccagattagctaatttttaattctttttcagtctttacatccacttttctgcaagaatactgagttccagccaaactggctcacttcctgcttcctga

SEQ ID NO: 12 - DNA, 1379 bp, Homo sapiens
gacgagaattaatgattgctgagaattagtacttaaaattgttgcagaaatgttttctgtttattgcttataggtatagattaaaagaaataagataaagttttaaattatgtaaagatttagataaactacattctctatgtgtgtgaaatccgttgtttttcactgattatagtcagtggattagcaccaacttatctaggcaaacagcactaacagtttgttagtgagtatgcaaaaacctacttttgcttttaatactgtatattaccactcatactatttactcacataaacaaattggtgatgatacatagattttgaaataacactgattacttcatcctggaaaggttttccggttttttgttttttttttggcggggggggttgttttgtttttttagagttatagtaaatatcccattcatcacttaattggtttttggcttttggatattaaagtcgtaattttgtttctaaactcatttggcccacaggtggaaatggtgtattcattgttgtcaatgcttggtactcatgataaggatgatatgtcgcgaactttgctagctatgtctagctcccaagacagctgtatatccatgcgacagtctggatgtcttcctctcctcatccagcttttacatggcaatgacaaagactctgtattgttgggaaattcccggggcagtaaagaggctcgggccagggccagtgcagcactccacaacatcattcactcacagcctgatgacaagagaggcaggcgtgaaatccgagtccttcatcttttggaacagatacgcgcttactgtgaaacctgttgggagtggcaggaagctcatgaaccaggcatggaccaggacaaaaatccaagtatgttctctatagtgtacatcgtagtgcatgtttcaaagcaaatgtgaaatttttaaacagaaaacatgtttagttaatatgctgtctttatgactaagaggagaaaattcatatcagccatttgtgctactcatatttaaaagattaagtctgtatttccctagaaaaatttagcaaaggaaaatgttatgtgcactactataagaacagtaagtcaagagaaatttatacaatcatagcatagtagggccttagtagagctagaaagaacttgagcaattatgttgcccatctttcacttcatagctgaagctcatttcatagatgaaagtgactttacgtaagttcctatagccattagtgtccaaaccataatcttttacatttgcatatcattatattcaggggatacagagcagcgttacatctgttatgttatttgctcctcacatcaacctactgaagtaggaagggaaggtattatcatctccatttta

SEQ ID NO: 13 - DNA, 1096 bp, Homo sapiens
gctccggaagctgaggcaggaaggtcaattgagcccaggaatacaaggctgcggtgaaagctatgatcattccactcgagcctgggcaacagagcaagaccctgttttgttttttttttgttgtttttttaaagaaagaaagaaattataaacaaaattaaaccattttataccaaaatatttttattattttgtatactcaacataattttaagttattagctatatgagtaatagcataaacctcctagacttattctaagagacttagtcaagggcagatgagtggtaaacatttttatggaaacaaatccctttattcctattttttgttccacatttgtagtatttattcatcctttcagcaaatatttgttgatccactaaaattccgtgaattagggttatattagtgatccctgcatatttttaaagtacaataaacatcattgctcttcaaataacaaagcattatggtttatgttgattttatttttcagtgccagctcctgttgaacatcagatctgtcctgctgtgtgtgttctaatgaaactttcatttgatgaagagcatagacatgcaatgaatgaactaggtaagacaaaaatgttttttaatgacatagacaattactggtggatttttaaatcatggtagaaattcagtatagtaaataaagatttttaatcattgatgaattaggatataaggccaccaacttctgttatcagctgcttcctctgtgtagcaaaaaattgtaccctggtttccagcatagaaaggatcctgaatcacagaaactgctaccctgtcataagctaactttttcaaaatcgaagccggagattgaaaaaaaatgacaaaatgggtcactctttgtcccttttgccaaagtagactctatatgtgccagctgatgaggatggtaatttgaattattttgaaatgtggagctgctgtattgtgattgaactcagtcacttttgatgagcatcagagggaattattattaagattgtcatttatcttcatggttattggtactttacaggattttcatcataagcagcctggtatctttgaaattggttaata

SEQ ID NO: 14 - DNA, 1140 bp, Homo sapiens
tttttagtttttcttcatgcacagtttcatttaaaggcatccgtattcctaagggtaattatttgccaaaaaaaaaaaattaaagtagttaggccacagtgtatgacaataaagagtgtttataaagccctaataataataataagttacctttttctgcttatgttcacgaagaactagtgttagaaaatagccttcttcactgttggcaaggtgcagtgtatatgcagtaaatagaaaataattatttcgctcagcaagataaggggctgggggtggagaaactggcataaaatggaataattgtcagttgtactttataaatatattatacagaagttctttataacagtttttgtagcttataattctaaaggcaaatttaaaccatatattctcattgattgagtttttttttcctagtatttaagttaccaacttggtaccagtttgttttattttagatgattgtctttttcctcttgccctttttaaattagggggactacaggccattgcagaattattgcaagtggactgtgaaatgtatgggcttactaatgaccactacagtattacactaagacgatatgctggaatggctttgacaaacttgacttttggagatgtagccaacaaggtatgtttttataacatgtatttcttaagatagctcaggtatgagttaatttactttcatacaaatacattttactgattttcttttttttcactctcctcattaaacaatgactgataaaaacctgtgcttcacattcgcttatctttactcatttgtttgtcttatgcctaaacaaaggcaaaggtacatctacagatggaacacagtagtgaatttatgtaattgcattaaaaacaccattcataagaatatacttgtagggatcatttctgtgatccattactagagaagtttaactgtgtagaattaaaaaataaaagataaaacacttcctaggaatgggattaaaaatctaaaaattcttaagaccaaggcaagtgttacacacacattgattccatccaaataagaggctttactctaaaacctgttgcttatcatttctcaccacttattcactttatttctctagtttgacaaaggaagaacagatagca

SEQ ID NO: 15 - DNA, 1078 bp, Homo sapiens
caaaggtacatctacagatggaacacagtagtgaatttatgtaattgcattaaaaacaccattcataagaatatacttgtagggatcatttctgtgatccattactagagaagtttaactgtgtagaattaaaaaataaaagataaaacacttcctaggaatgggattaaaaatctaaaaattcttaagaccaaggcaagtgttacacacacattgattccatccaaataagaggctttactctaaaacctgttgcttatcatttctcaccacttattcactttatttctctagtttgacaaaggaagaacagatagcaaagaattaggagaatatttgtcttttatttaggtaatcttattctagattttttatgagtgaagtatcagttatgattaaaacaaaataatgaaaactgaattagacatttagtagccaaaaataaagcttggcttcaagttgtctttttaatgatcctctattctgtatttaatttacaggctacgctatgctctatgaaaggctgcatgagagcacttgtggcccaactaaaatctgaaagtgaagacttacagcaggtactatttagaatttcacctgtttttcttttttctctttttctttgaggcagggtctcactctgtcacccaggcttagagggcagttgtgcaatctcagctcactgcaacctctgcctccagggttcaagcaatcctcccacttcagcctctcgaggctgggcctacaggtgcacaccaccatgccaaacgaatttttgtattttttatagagacggggtttcaccacacctgggctcaagcaatctgcccacctcagcatctcaaaatgctgggattacaggcgtgtgccaccacacccagctaatatcctgatttagattgttgctcagtatttagtatctcatgtataaaagatagttccattaacactagaaaaagaaaaataattatattgtggttagactgtaggaaatctttttggcactgtagtagcatttaggaggaatttaaaaaaaaaaaaaaaaacaggatctccctctcttgcccaggctggagtg

SEQ ID NO: 16 - DNA, 1117 bp, Homo sapiens
ataaaagatagttccattaacactagaaaaagaaaaataattatattgtggttagactgtaggaaatctttttggcactgtagtagcatttaggaggaatttaaaaaaaaaaaaaaaaacaggatctccctctcttgcccaggctggagtgcagtggtgcgattatggctcacagtaacctcaagctcctgggatcctcctgcttcagcctcccaagtagctagaactactgcaggcgcatgccaccatgcccagctaatttttaaaaagttttcatagagacagggtctcactgtgttacccagaaggtcttgaactcctggtctcaggagatcctcctgcctcagcctcccaaagtgataggattacaggcgtgagtcaccacggctagccagaatttctttcttaatagatttctattcttactgctagcattaaaaacaaaaaagcaactagtatgattttatgtataaattaatctaaaattgattaatttgcaggttattgcgagtgttttgaggaatttgtcttggcgagcagatgtaaatagtaaaaagacgttgcgagaagttggaagtgtgaaagcattgatggaatgtgctttagaagttaaaaaggtacctttgaaaacatttagtactataatatgaatttcatgtttggcttttttttgctgccttcttttagccatgagatttcctaatttcttacctgtgtattattcagtactataatatgaatttcatgtttagctttttttgctgccttcttttagccatgagattccctaatttcttttttgagatggggtctctttctctcgcccaggctggagtgcagtggtctgatcttggctcactgcaacctccgtctcccatgttcaagtgattctcctgcctcagcctcctgagtagctgggattacagtgcacgccaccactcccggctatttgtatttttagtagagatggggtttcaccatgttggtaaggctggtctcgaactactcctgactttgtgatctgcccaactcggcctcccaaagtgctgggattataggcgcaagccatcacgcccagcctagattccctaatttcttacctgtttatctcaccagt

SEQ ID NO: 17 - DNA, 1215 bp, Homo sapiens
gcgaggctggtcttgaactcctgacctcagatgatccacccgtcagcctcccaaagtgctgggattacaggcatgagccactgtgcccggccacatgccgggccttaatccacttcctgttcacttttttttttcttttttcaagcaaccccagcctgagaataacccacattctattctgaaaatgttttcttttcataatgcacatcagttgtgcctcatattctaagatgtgtgtactatctaaacacttagaataaagtttataaaagtcattagttaaatattgtgttctgcttgttttatagagatatcactgatataaatactatttggtattttatgaacatttttctaaatggaaagttcttaatttaccagtgagggacgggcaataggatagattaaaaaatagcttttattcaatatcagtaacatagaagttaatgagagacaaattccaactctaattagatgacccatattctgtttcttactaggaatcaaccctcaaaagcgtattgagtgccttatggaatttgtcagcacattgcactgagaataaagctgatatatgtgctgtagatggtgcacttgcatttttggttggcactcttacttaccggagccagacaaacactttagccattattgaaagtggaggtgggatattacggaatgtgtccagcttgatagctacaaatgaggaccacaggtatatatagagttttatattacttttaaagtacagaattcatactctcaaaaagacctaattgtaagcaatgttttatataatcatgaaagttttaagccaaaatatatttattactgtgaaaagataactactaactcttagtttaactcattagtgtacttaatgtaataacagtttatagtattatagaggagactaaattaagcaaattatagttgagaggtgtagcccataggtggaggaaaaaatagtcacaaatattgtaacaaaataatccatttctattagtatagtataaaagagtatgaaaacaaaatttagaacaagacaaaaactatgagcgtgatccagagaatataaaggttcacatttttctaatgatgtcttagtatccataataataattttttttttttttttttgagacagggtctcactctgtctcccagactggagggcagtgttgtgatcttggctcactgcaacctccacctcct

SEQ ID NO: 18 - DNA, 9687 bp, Homo sapiens
gagattactctaaaaagtaagtgttctaatctaagagcttataatgtgcactgactgcagaaaaatcttcaatcaattctatctacctcttccaagataactcaatatcaatatcagagtggcacccaaccatagattaaattaccacaaagttcctattcaacataggatttcatgatatagtttttaaattgggaaactgttatatgaatagagtaaatgtatgtgccccaccccctgcaaatgttttaagctattgggtcagaataggaaatgtagaattgacaaaaaataacacctttactttttttagtgtgacagattagtactttaaaacattaaacattacatgaaattagaacaaaaggagatgtggaatacttggaatttataggataattggtacaatcatattatgccttttgtcttctatccttttatttgttgttactgcatacacattgtgaccttaattttgtgatctcttgattttatttcaggcaaatcctaagagagaacaactgtctacaaactttattacaacacttaaaatctcatagtttgacaatagtcagtaatgcatgtggaactttgtggaatctctcagcaagaaatcctaaagaccaggaagcattatgggacatgggggcagttagcatgctcaagaacctcattcattcaaagcacaaaatgattgctatgggaagtgctgcagctttaaggaatctcatggcaaataggcctgcgaagtacaaggatgccaatattatgtctcctggctcaagcttgccatctcttcatgttaggaaacaaaaagccctagaagcagaattagatgctcagcacttatcagaaacttttgacaatatagacaatttaagtcccaaggcatctcatcgtagtaagcagagacacaagcaaagtctctatggtgattatgtttttgacaccaatcgacatgatgataataggtcagacaattttaatactggcaacatgactgtcctttcaccatatttgaatactacagtgttacccagctcctcttcatcaagaggaagcttagatagttctcgttctgaaaaagatagaagtttggagagagaacgcggaattggtctaggcaactaccatccagcaacagaaaatccaggaacttcttcaaagcgaggtttgcagatctccaccactgcagcccagattgccaaagtcatggaagaagtgtcagccattcatacctctcaggaagacagaagttctgggtctaccactgaattacattgtgtgacagatgagagaaatgcacttagaagaagctctgctgcccatacacattcaaacacttacaatttcactaagtcggaaaattcaaataggacatgttctatgccttatgccaaattagaatacaagagatcttcaaatgatagtttaaatagtgtcagtagtagtgatggttatggtaaaagaggtcaaatgaaaccctcgattgaatcctattctgaagatgatgaaagtaagttttgcagttatggtcaatacccagccgacctagcccataaaatacatagtgcaaatcatatggatgataatgatggagaactagatacaccaataaattatagtcttaaatattcagatgagcagttgaactctggaaggcaaagtccttcacagaatgaaagatgggcaagacccaaacacataatagaagatgaaataaaacaaagtgagcaaagacaatcaaggaatcaaagtacaacttatcctgtttatactgagagcactgatgataaacacctcaagttccaaccacattttggacagcaggaatgtgtttctccatacaggtcacggggagccaatggttcagaaacaaatcgagtgggttctaatcatggaattaatcaaaatgtaagccagtctttgtgtcaagaagatgactatgaagatgataagcctaccaattatagtgaacgttactctgaagaagaacagcatgaagaagaagagagaccaacaaattatagcataaaatataatgaagagaaacgtcatgtggatcagcctattgattatagtttaaaatatgccacagatattccttcatcacagaaacagtcattttcattctcaaagagttcatctggacaaagcagtaaaaccgaacatatgtcttcaagcagtgagaatacgtccacaccttcatctaatgccaagaggcagaatcagctccatccaagttctgcacagagtagaagtggtcagcctcaaaaggctgccacttgcaaagtttcttctattaaccaagaaacaatacagacttattgtgtagaagatactccaatatgtttttcaagatgtagttcattatcatctttgtcatcagctgaagatgaaataggatgtaatcagacgacacaggaagcagattctgctaataccctgcaaatagcagaaataaaagaaaagattggaactaggtcagctgaagatcctgtgagcgaagttccagcagtgtcacagcaccctagaaccaaatccagcagactgcagggttctagtttatcttcagaatcagccaggcacaaagctgttgaattttcttcaggagcgaaatctccctccaaaagtggtgctcagacacccaaaagtccacctgaacactatgttcaggagaccccactcatgtttagcagatgtacttctgtcagttcacttgatagttttgagagtcgttcgattgccagctccgttcagagtgaaccatgcagtggaatggtaagtggcattataagccccagtgatcttccagatagccctggacaaaccatgccaccaagcagaagtaaaacacctccaccacctcctcaaacagctcaaaccaagcgagaagtacctaaaaataaagcacctactgctgaaaagagagagagtggacctaagcaagctgcagtaaatgctgcagttcagagggtccaggttcttccagatgctgatactttattacattttgccacggaaagtactccagatggattttcttgttcatccagcctgagtgctctgagcctcgatgagccatttatacagaaagatgtggaattaagaataatgcctccagttcaggaaaatgacaatgggaatgaaacagaatcagagcagcctaaagaatcaaatgaaaaccaagagaaagaggcagaaaaaactattgattctgaaaaggacctattagatgattcagatgatgatgatattgaaatactagaagaatgtattatttctgccatgccaacaaagtcatcacgtaaagcaaaaaagccagcccagactgcttcaaaattacctccacctgtggcaaggaaaccaagtcagctgcctgtgtacaaacttctaccatcacaaaacaggttgcaaccccaaaagcatgttagttttacaccgggggatgatatgccacgggtgtattgtgttgaagggacacctataaacttttccacagctacatctctaagtgatctaacaatcgaatcccctccaaatgagttagctgctggagaaggagttagaggaggggcacagtcaggtgaatttgaaaaacgagataccattcctacagaaggcagaagtacagatgaggctcaaggaggaaaaacctcatctgtaaccatacctgaattggatgacaataaagcagaggaaggtgatattcttgcagaatgcattaattctgctatgcccaaagggaaaagtcacaagcctttccgtgtgaaaaagataatggaccaggtccagcaagcatctgcgtcttcttctgcacccaacaaaaatcagttagatggtaagaaaaagaaaccaacttcaccagtaaaacctataccacaaaatactgaatataggacacgtgtaagaaaaaatgcagactcaaaaaataatttaaatgctgagagagttttctcagacaacaaagattcaaagaaacagaatttgaaaaataattccaaggtcttcaatgataagctcccaaataatgaagatagagtcagaggaagttttgcttttgattcacctcatcattacacgcctattgaaggaactccttactgtttttcacgaaatgattctttgagttctctagattttgatgatgatgatgttgacctttccagggaaaaggctgaattaagaaaggcaaaagaaaataaggaatcagaggctaaagttaccagccacacagaactaacctccaaccaacaatcagctaataagacacaagctattgcaaagcagccaataaatcgaggtcagcctaaacccatacttcagaaacaatccacttttccccagtcatccaaagacataccagacagaggggcagcaactgatgaaaagttacagaattttgctattgaaaatactccggtttgcttttctcataattcctctctgagttctctcagtgacattgaccaagaaaacaacaataaagaaaatgaacctatcaaagagactgagccccctgactcacagggagaaccaagtaaacctcaagcatcaggctatgctcctaaatcatttcatgttgaagataccccagtttgtttctcaagaaacagttctctcagttctcttagtattgactctgaagatgacctgttgcaggaatgtataagctccgcaatgccaaaaaagaaaaagccttcaagactcaagggtgataatgaaaaacatagtcccagaaatatgggtggcatattaggtgaagatctgacacttgatttgaaagatatacagagaccagattcagaacatggtctatcccctgattcagaaaattttgattggaaagctattcaggaaggtgcaaattccatagtaagtagtttacatcaagctgctgctgctgcatgtttatctagacaagcttcgtctgattcagattccatcctttccctgaaatcaggaatctctctgggatcaccatttcatcttacacctgatcaagaagaaaaaccctttacaagtaataaaggcccacgaattctaaaaccaggggagaaaagtacattggaaactaaaaagatagaatctgaaagtaaaggaatcaaaggaggaaaaaaagtttataaaagtttgattactggaaaagttcgatctaattcagaaatttcaggccaaatgaaacagccccttcaagcaaacatgccttcaatctctcgaggcaggacaatgattcatattccaggagttcgaaatagctcctcaagtacaagtcctgtttctaaaaaaggcccaccccttaagactccagcctccaaaagccctagtgaaggtcaaacagccaccacttctcctagaggagccaagccatctgtgaaatcagaattaagccctgttgccaggcagacatcccaaataggtgggtcaagtaaagcaccttctagatcaggatctagagattcgaccccttcaagacctgcccagcaaccattaagtagacctatacagtctcctggccgaaactcaatttcccctggtagaaatggaataagtcctcctaacaaattatctcaacttccaaggacatcatcccctagtactgcttcaactaagtcctcaggttctggaaaaatgtcatatacatctccaggtagacagatgagccaacagaaccttaccaaacaaacaggtttatccaagaatgccagtagtattccaagaagtgagtctgcctccaaaggactaaatcagatgaataatggtaatggagccaataaaaaggtagaactttctagaatgtcttcaactaaatcaagtggaagtgaatctgatagatcagaaagacctgtattagtacgccagtcaactttcatcaaagaagctccaagcccaaccttaagaagaaaattggaggaatctgcttcatttgaatctctttctccatcatctagaccagcttctcccactaggtcccaggcacaaactccagttttaagtccttcccttcctgatatgtctctatccacacattcgtctgttcaggctggtggatggcgaaaactcccacctaatctcagtcccactatagagtataatgatggaagaccagcaaagcgccatgatattgcacggtctcattctgaaagtccttctagacttccaatcaataggtcaggaacctggaaacgtgagcacagcaaacattcatcatcccttcctcgagtaagcacttggagaagaactggaagttcatcttcaattctttctgcttcatcagaatccagtgaaaaagcaaaaagtgaggatgaaaaacatgtgaactctatttcaggaaccaaacaaagtaaagaaaaccaagtatccgcaaaaggaacatggagaaaaataaaagaaaatgaattttctcccacaaatagtacttctcagaccgtttcctcaggtgctacaaatggtgctgaatcaaagactctaatttatcaaatggcacctgctgtttctaaaacagaggatgtttgggtgagaattgaggactgtcccattaacaatcctagatctggaagatctcccacaggtaatactcccccggtgattgacagtgtttcagaaaaggcaaatccaaacattaaagattcaaaagataatcaggcaaaacaaaatgtgggtaatggcagtgttcccatgcgtaccgtgggtttggaaaatcgcctgaactcctttattcaggtggatgcccctgaccaaaaaggaactgagataaaaccaggacaaaataatcctgtccctgtatcagagactaatgaaagttctatagtggaacgtaccccattcagttctagcagctcaagcaaacacagttcacctagtgggactgttgctgccagagtgactccttttaattacaacccaagccctaggaaaagcagcgcagatagcacttcagctcggccatctcagatcccaactccagtgaataacaacacaaagaagcgagattccaaaactgacagcacagaatccagtggaacccaaagtcctaagcgccattctgggtcttaccttgtgacatctgtttaaaagagaggaagaatgaaactaagaaaattctatgttaattacaactgctatatagacattttgtttcaaatgaaactttaaaagactgaaaaattttgtaaataggtttgattcttgttagagggtttttgttctggaagccatatttgatagtatactttgtcttcactggtcttattttgggaggcactcttgatggttaggaaaaaaatagtaaagccaagtatgtttgtacagtatgttttacatgtatttaaagtagcatcccatcccaacttcctttaattattgcttgtcttaaaataatgaacactacagatagaaaatatgatatattgctgttatcaatcatttctagattataaactgactaaacttacatcagggaaaaattggtatttatgcaaaaaaaaatgtttttgtccttgtgagtccatctaacatcataattaatcatgtggctgtgaaattcacagtaatatggttcccgatgaacaagtttacccagcctgctttgctttactgcatgaatgaaactgatggttcaatttcagaagtaatgattaacagttatgtggtcacatgatgtgcatagagatagctacagtgtaataatttacactattttgtgctccaaacaaaacaaaaatctgtgtaactgtaaaacattgaatgaaactattttacctgaactagattttatctgaaagtaggtagaatttttgctatgctgtaatttgttgtatattctggtatttgaggtgagatggctgctcttttattaatgagacatgaattgtgtctcaacagaaactaaatgaacatttcagaataaattattgctgtatgtaaactgttactgaaattggtatttgtttgaagggtcttgtttcacatttgtattaataattgtttaaaatgcctcttttaaaagcttatataaatttttttcttcagcttctatgcattaagagtaaaattcctcttactgtaataaaaacaattgaagaagactgttgccacttaaccattccatgcgttggcacttatctattcctgaaatttcttttatgtgattagctcatcttgatttttaatatttttccacttaaacttttttttcttactccactggagctcagtaaaagtaaattcatgtaatagcaatgcaagcagcctagcacagactaagcattgagcataataggcccacataatttcctctttcttaatattatagaattctgtacttgaaattgattcttagacattgcagtctcttcgaggctttacagtgtaaactgtcttgccccttcatcttcttgttgcaactgggtctgacatgaacactttttatcaccctgtatgttagggcaagatctcagcagtgaagtataatcagcactttgccatgctcagaaaattcaaatcacatggaactttagaggtagatttaatacgattaagatattcagaagtatattttagaatccctgcctgttaaggaaactttatttgtggtaggtacagttctggggtacatgttaagtgtccccttatacagtggagggaagtcttccttcctgaaggaaaataaactgacacttattaactaagataatttacttaatatatcttccctgatttgttttaaaagatcagagggtgactgatgatacatgcatacatatttgttgaataaatgaaaatttatttttagtgataagattcatacactctgtatttggggagggaaaacctttttaagcatggtggggcactcagataggagtgaatacacctacctggtgccttgaaaatcacatcaagtagttaattatctaccccttacctgtgtttataacttccaggtaatgagaatgattttttttaaagctaaaatgccagtaaataaaagtgctatgacttgagctaagatatttgactccaatgcctgtactgtgtctactgcaccactttgtaaacacttcaatttactatctttgaaatgattgacctttaaatttttgccaaatgttatctgaaattgtctatgaataccatctacttctgttgttttcccaggcttccataaacaatggagatacatgcatataggtcatactggtttcctttcattttttgattttctatttctaattttctgaattactgcatgccagttgttgcaaaccacttcaagtacttctatggaaagagatggatgttagtcaattagataaacttgccttttaattcaaataaggaagaaaatataaatgctgaaaatgaacattccacatgccagaaaagtggaatttttgtaggcaacacttgagtggggggagacgggccagtctatactacccattgaagtaaagactgctggatgaggccctctgttagagatagtggttctgaattagtaaaggggcaaatctcaattctaattatagatgttcacagggtgctgctataatcgatagcaggccaaatattcccagtttatgcttgttaacaaatggcatactaagcccagcgttgggaattagtcaggagttacgatgcctgtttagagaggagtgggggagggagagttacctaacgtaaggc

SEQ ID NO: 19 - DNA, 1500 bp, Homo sapiens
taagataatttacttaatatatcttccctgatttgttttaaaagatcagagggtgactgatgatacatgcatacatatttgttgaataaatgaaaatttatttttagtgataagattcatacactctgtatttggggagggaaaacctttttaagcatggtggggcactcagataggagtgaatacacctacctggtgccttgaaaatcacatcaagtagttaattatctaccccttacctgtgtttataacttccaggtaatgagaatgattttttttaaagctaaaatgccagtaaataaaagtgctatgacttgagctaagatatttgactccaatgcctgtactgtgtctactgcaccactttgtaaacacttcaatttactatctttgaaatgattgacctttaaatttttgccaaatgttatctgaaattgtctatgaataccatctacttctgttgttttcccaggcttccataaacaatggagatacatgcatataggtcatactggtttcctttcattttttgattttctatttctaattttctgaattactgcatgccagttgttgcaaaccacttcaagtacttctatggaaagagatggatgttagtcaattagataaacttgccttttaattcaaataaggaagaaaatataaatgctgaaaatgaacattccacatgccagaaaagtggaatttttgtaggcaacacttgagtggggggagacgggccagtctatactacccattgaagtaaagactgctggatgaggccctctgttagagatagtggttctgaattagtaaaggggcaaatctcaattctaattatagatgttcacagggtgctgctataatcgatagcaggccaaatattcccagtttatgcttgttaacaaatggcatactaagcccagcgttgggaattagtcaggagttacgatgcctgtttagagaggagtgggggagggagagttacctaacgtaaggcacttcaaaggagtgcgttgggatcaccaggagtgcttaacaagacatagctgggccatacccccagtttgattcaggatgtttggaatggggcctaagaacttgcatatctaacaagttcaaaggtgaggctaatgctgctggtctggagaccacactttttgagaattactgccctaagatcacagtgaagctccttgagtggttgccttcagctctagcgattcctcccaacaactggacccttaatctgacaaagtatagcaacagataaaagacttcccctaggcataaaagatttcaatattaagccatccaatttcataatgctcatctcaactcctgacagcagacaaacttagccagacatgaacaaacaagtaattctaaagacagtgattatatttgaaggatcagttaatgttccctttgagactgtcattataaaaagcagtaacttcagcaaagatctaatttgaattttcaataagattaaaagac

SEQ ID NO: 20 - DNA, 13147 bp, Homo sapiens
ccggagcccgagccgaagggcgagccgcaaacgctaagtcgctggccattggtggacatggcgcaggcgcgtttgctccgacgggccgaatgttttggggcagtgttttgagcgcggagaccgcgtgatactggatgcgcatgggcataccgtgctctgcggctgcttggcgttgcttcttcctccagaagtgggcgctgggcagtcacgcagggtttgaaccggaagcgggagtaggtagctgcgtggctaacggagaaaagaagccgtggccgcgggaggaggcgagaggagtcgggatctgcgctgcagccaccgccgcggttgatactactttgaccttccgagtgcagtgacagtgatgtgtgttctgaaattgtgaaccatgagtctagtacttaatgatctgcttatctgctgccgtcaactagaacatgatagagctacagaacgaaagaaagaagttgagaaatttaagcgcctgattcgagatcctgaaacaattaaacatctagatcggcattcagattccaaacaaggaaaatatttgaattgggatgctgtttttagatttttacagaaatatattcagaaagaaacagaatgtctgagaatagcaaaaccaaatgtatcagcctcaacacaagcctccaggcagaaaaagatgcaggaaatcagtagtttggtcaaatacttcatcaaatgtgcaaacagaagagcacctaggctaaaatgtcaagaactcttaaattatatcatggatacagtgaaagattcatctaatggtgctatttacggagctgattgtagcaacatactactcaaagacattctttctgtgagaaaatactggtgtgaaatatctcagcaacagtggttagaattgttctctgtgtacttcaggctctatctgaaaccttcacaagatgttcatagagttttagtggctagaataattcatgctgttaccaaaggatgctgttctcagactgacggattaaattccaaatttttggactttttttccaaggctattcagtgtgcgagacaagaaaagagctcttcaggtctaaatcatatcttagcagctcttactatcttcctcaagactttggctgtcaactttcgaattcgagtgtgtgaattaggagatgaaattcttcccactttgctttatatttggactcaacataggcttaatgattctttaaaagaagtcattattgaattatttcaactgcaaatttatatccatcatccgaaaggagccaaaacccaagaaaaaggtgcttatgaatcaacaaaatggagaagtattttatacaacttatatgatctgctagtgaatgagataagtcatataggaagtagaggaaagtattcttcaggatttcgtaatattgccgtcaaagaaaatttgattgaattgatggcagatatctgtcaccaggtttttaatgaagataccagatccttggagatttctcaatcttacactactacacaaagagaatctagtgattacagtgtcccttgcaaaaggaagaaaatagaactaggctgggaagtaataaaagatcaccttcagaagtcacagaatgattttgatcttgtgccttggctacagattgcaacccaattaatatcaaagtatcctgcaagtttacctaactgtgagctgtctccattactgatgatactatctcagcttctaccccaacagcgacatggggaacgtacaccatatgtgttacgatgccttacggaagttgcattgtgtcaagacaagaggtcaaacctagaaagctcacaaaagtcagatttattaaaactctggaataaaatttggtgtattacctttcgtggtataagttctgagcaaatacaagctgaaaactttggcttacttggagccataattcagggtagtttagttgaggttgacagagaattctggaagttatttactgggtcagcctgcagaccttcatgtcctgcagtatgctgtttgactttggcactgaccaccagtatagttccaggaacggtaaaaatgggaatagagcaaaatatgtgtgaagtaaatagaagcttttctttaaaggaatcaataatgaaatggctcttattctatcagttagagggtgacttagaaaatagcacagaagtgcctccaattcttcacagtaattttcctcatcttgtactggagaaaattcttgtgagtctcactatgaaaaactgtaaagctgcaatgaattttttccaaagcgtgccagaatgtgaacaccaccaaaaagataaagaagaactttcattctcagaagtagaagaactatttcttcagacaacttttgacaagatggactttttaaccattgtgagagaatgtggtatagaaaagcaccagtccagtattggcttctctgtccaccagaatctcaaggaatcactggatcgctgtcttctgggattatcagaacagcttctgaataattactcatctgagattacaaattcagaaactcttgtccggtgttcacgtcttttggtgggtgtccttggctgctactgttacatgggtgtaatagctgaagaggaagcatataagtcagaattattccagaaagccaagtctctaatgcaatgtgcaggagaaagtatcactctgtttaaaaataagacaaatgaggaattcagaattggttccttgagaaatatgatgcagctatgtacacgttgcttgagcaactgtaccaagaagagtccaaataagattgcatctggctttttcctgcgattgttaacatcaaagctaatgaatgacattgcagatatttgtaaaagtttagcatccttcatcaaaaagccatttgaccgtggagaagtagaatcaatggaagatgatactaatggaaatctaatggaggtggaggatcagtcatccatgaatctatttaacgattaccctgatagtagtgttagtgatgcaaacgaacctggagagagccaaagtaccataggtgccattaatcctttagctgaagaatatctgtcaaagcaagatctacttttcttagacatgctcaagttcttgtgtttgtgtgtaactactgctcagaccaatactgtgtcctttagggcagctgatattcggaggaaattgttaatgttaattgattctagcacgctagaacctaccaaatccctccacctgcatatgtatctaatgcttttaaaggagcttcctggagaagagtaccccttgccaatggaagatgttcttgaacttctgaaaccactatccaatgtgtgttctttgtatcgtcgtgaccaagatgtttgtaaaactattttaaaccatgtccttcatgtagtgaaaaacctaggtcaaagcaatatggactctgagaacacaagggatgctcaaggacagtttcttacagtaattggagcattttggcatctaacaaaggagaggaaatatatattctctgtaagaatggccctagtaaattgccttaaaactttgcttgaggctgatccttattcaaaatgggccattcttaatgtaatgggaaaagactttcctgtaaatgaagtatttacacaatttcttgctgacaatcatcaccaagttcgcatgttggctgcagagtcaatcaatagattgttccaggacacgaagggagattcttccaggttactgaaagcacttcctttgaagcttcagcaaacagcttttgaaaatgcatacttgaaagctcaggaaggaatgagagaaatgtcccatagtgctgagaaccctgaaactttggatgaaatttataatagaaaatctgttttactgacgttgatagctgtggttttatcctgtagccctatctgcgaaaaacaggctttgtttgccctgtgtaaatctgtgaaagagaatggattagaacctcaccttgtgaaaaaggttttagagaaagtttctgaaacttttggatatagacgtttagaagactttatggcatctcatttagattatctggttttggaatggctaaatcttcaagatactgaatacaacttatcttcttttccttttattttattaaactacacaaatattgaggatttctatagatcttgttataaggttttgattccacatctggtgattagaagtcattttgatgaggtgaagtccattgctaatcagattcaagaggactggaaaagtcttctaacagactgctttccaaagattcttgtaaatattcttccttattttgcctatgagggtaccagagacagtgggatggcacagcaaagagagactgctaccaaggtctatgatatgcttaaaagtgaaaacttattgggaaaacagattgatcacttattcattagtaatttaccagagattgtggtggagttattgatgacgttacatgagccagcaaattctagtgccagtcagagcactgacctctgtgacttttcaggggatttggatcctgctcctaatccacctcattttccatcgcatgtgattaaagcaacatttgcctatatcagcaattgtcataaaaccaagttaaaaagcattttagaaattctttccaaaagccctgattcctatcagaaaattcttcttgccatatgtgagcaagcagctgaaacaaataatgtttataagaagcacagaattcttaaaatatatcacctgtttgttagtttattactgaaagatataaaaagtggcttaggaggagcttgggcctttgttcttcgagacgttatttatactttgattcactatatcaaccaaaggccttcttgtatcatggatgtgtcattacgtagcttctccctttgttgtgacttattaagtcaggtttgccagacagccgtgacttactgtaaggatgctctagaaaaccatcttcatgttattgttggtacacttataccccttgtgtatgagcaggtggaggttcagaaacaggtattggacttgttgaaatacttagtgatagataacaaggataatgaaaacctctatatcacgattaagcttttagatccttttcctgaccatgttgtttttaaggatttgcgtattactcagcaaaaaatcaaatacagtagaggacccttttcactcttggaggaaattaaccattttctctcagtaagtgtttatgatgcacttccattgacaagacttgaaggactaaaggatcttcgaagacaactggaactacataaagatcagatggtggacattatgagagcttctcaggataatccgcaagatgggattatggtgaaactagttgtcaatttgttgcagttatccaagatggcaataaaccacactggtgaaaaagaagttctagaggctgttggaagctgcttgggagaagtgggtcctatagatttctctaccatagctatacaacatagtaaagatgcatcttataccaaggcccttaagttatttgaagataaagaacttcagtggaccttcataatgctgacctacctgaataacacactggtagaagattgtgtcaaagttcgatcagcagctgttacctgtttgaaaaacattttagccacaaagactggacatagtttctgggagatttataagatgacaacagatccaatgctggcctatctacagccttttagaacatcaagaaaaaagtttttagaagtacccagatttgacaaagaaaacccttttgaaggcctggatgatataaatctgtggattcctctaagtgaaaatcatgacatttggataaagacactgacttgtgcttttttggacagtggaggcacaaaatgtgaaattcttcaattattaaagccaatgtgtgaagtgaaaactgacttttgtcagactgtacttccatacttgattcatgatattttactccaagatacaaatgaatcatggagaaatctgctttctacacatgttcagggatttttcaccagctgtcttcgacacttctcgcaaacgagccgatccacaacccctgcaaacttggattcagagtcagagcactttttccgatgctgtttggataaaaaatcacaaagaacaatgcttgctgttgtggactacatgagaagacaaaagagaccttcttcaggaacaatttttaatgatgctttctggctggatttaaattatctagaagttgccaaggtagctcagtcttgtgctgctcactttacagctttactctatgcagaaatctatgcagataagaaaagtatggatgatcaagagaaaagaagtcttgcatttgaagaaggaagccagagtacaactatttctagcttgagtgaaaaaagtaaagaagaaactggaataagtttacaggatcttctcttagaaatctacagaagtataggggagccagatagtttgtatggctgtggtggagggaagatgttacaacccattactagactacgaacatatgaacacgaagcaatgtggggcaaagccctagtaacatatgacctcgaaacagcaatcccctcatcaacacgccaggcaggaatcattcaggccttgcagaatttgggactctgccatattctttccgtctatttaaaaggattggattatgaaaataaagactggtgtcctgaactagaagaacttcattaccaagcagcatggaggaatatgcagtgggaccattgcacttccgtcagcaaagaagtagaaggaaccagttaccatgaatcattgtacaatgctctacaatctctaagagacagagaattctctacattttatgaaagtctcaaatatgccagagtaaaagaagtggaagagatgtgtaagcgcagccttgagtctgtgtattcgctctatcccacacttagcaggttgcaggccattggagagctggaaagcattggggagcttttctcaagatcagtcacacatagacaactctctgaagtatatattaagtggcagaaacactcccagcttctcaaggacagtgattttagttttcaggagcctatcatggctctacgcacagtcattttggagatcctgatggaaaaggaaatggacaactcacaaagagaatgtattaaggacattctcaccaaacaccttgtagaactctctatactggccagaactttcaagaacactcagctccctgaaagggcaatatttcaaattaaacagtacaattcagttagctgtggagtctctgagtggcagctggaagaagcacaagtattctgggcaaaaaaggagcagagtcttgccctgagtattctcaagcaaatgatcaagaagttggatgccagctgtgcagcgaacaatcccagcctaaaacttacatacacagaatgtctgagggtttgtggcaactggttagcagaaacgtgcttagaaaatcctgcggtcatcatgcagacctatctagaaaaggcagtagaagttgctggaaattatgatggagaaagtagtgatgagctaagaaatggaaaaatgaaggcatttctctcattagcccggttttcagatactcaataccaaagaattgaaaactacatgaaatcatcggaatttgaaaacaagcaagctctcctgaaaagagccaaagaggaagtaggtctccttagggaacataaaattcagacaaacagatacacagtaaaggttcagcgagagctggagttggatgaattagccctgcgtgcactgaaagaggatcgtaaacgcttcttatgtaaagcagttgaaaattatatcaactgcttattaagtggagaagaacatgatatgtgggtattccgactttgttccctctggcttgaaaattctggagtttctgaagtcaatggcatgatgaagagagacggaatgaagattccaacatataaatttttgcctcttatgtaccaattggctgctagaatggggaccaagatgatgggaggcctaggatttcatgaagtcctcaataatctaatctctagaatttcaatggatcacccccatcacactttgtttattatactggccttagcaaatgcaaacagagatgaatttctgactaaaccagaggtagccagaagaagcagaataactaaaaatgtgcctaaacaaagctctcagcttgatgaggatcgaacagaggctgcaaatagaataatatgtactatcagaagtaggagacctcagatggtcagaagtgttgaggcactttgtgatgcttatattatattagcaaacttagatgccactcagtggaagactcagagaaaaggcataaatattccagcagaccagccaattactaaacttaagaatttagaagatgttgttgtccctactatggaaattaaggtggaccacacaggagaatatggaaatctggtgactatacagtcatttaaagcagaatttcgcttagcaggaggtgtaaatttaccaaaaataatagattgtgtaggttccgatggcaaggagaggagacagcttgttaagggccgtgatgacctgagacaagatgctgtcatgcaacaggtcttccagatgtgtaatacattactgcagagaaacacggaaactaggaagaggaaattaactatctgtacttataaggtggttcccctctctcagcgaagtggtgttcttgaatggtgcacaggaactgtccccattggtgaatttcttgttaacaatgaagatggtgctcataaaagatacaggccaaatgatttcagtgcctttcagtgccaaaagaaaatgatggaggtgcaaaaaaagtcttttgaagagaaatatgaagtcttcatggatgtttgccaaaattttcaaccagttttccgttacttctgcatggaaaaattcttggatccagctatttggtttgagaagcgattggcttatacgcgcagtgtagctacttcttctattgttggttacatacttggacttggtgatagacatgtacagaatatcttgataaatgagcagtcagcagaacttgtacatatagatctaggtgttgcttttgaacagggcaaaatccttcctactcctgagacagttccttttagactcaccagagatattgtggatggcatgggcattacgggtgttgaaggtgtcttcagaagatgctgtgagaaaaccatggaagtgatgagaaactctcaggaaactctgttaaccattgtagaggtccttctatatgatccactctttgactggaccatgaatcctttgaaagctttgtatttacagcagaggccggaagatgaaactgagcttcaccctactctgaatgcagatgaccaagaatgcaaacgaaatctcagtgatattgaccagagtttcaacaaagtagctgaacgtgtcttaatgagactacaagagaaactgaaaggagtggaagaaggcactgtgctcagtgttggtggacaagtgaatttgctcatacagcaggccatagaccccaaaaatctcagccgacttttcccaggatggaaagcttgggtgtgatcttcagtatatgaattaccctttcattcagcctttagaaattatattttagcctttatttttaacctgccaacatactttaagtagggattaatatttaagtgaactattgtgggtttttttgaatgttggttttaatacttgatttaatcaccactcaaaaatgttttgatggtcttaaggaacatctctgctttcactctttagaaataatggtcattcgggctgggcgcagcggctcacgcctgtaatcccagcactttgggaggccgaggtgagcggatcacaaggtcaggagttcgagaccagcctggccaagagaccagcctggccagtatggtgaaaccctgtctctactaaaaatacaaaaattagccgagcatggtggcgggcacctgtaatcccagctactcgagaggctgaggcaggagaatctcttgaacctgggaggtgaaggttgctgtgggccaaaatcatgccattgcactccagcctgggtgacaagagcgaaactccatctcaaaaaaaaaaaaaaaaaaacagaaacgtatttggatttttcctagtaagatcactcagtgttactaaataatgaagttgttatggagaacaaatttcaaagacacagttagtgtagttactatttttttaagtgtgtattaaaacttctcattctattctctttatcttttaagcccttctgtactgtccatgtatgttatctttctgtgataacttcatagattgccttctagttcatgaattctcttgtcagatgtatataatctcttttaccctatccattgggcttcttctttcagaaattgtttttcatttctaattatgcatcatttttcagatctctgtttcttgatgtcatttttaatgtttttttaatgttttttatgtcactaattattttaaatgtctgtacttgatagacactgtaatagttctattaaatttagttcctgctgtttatatctgttgatttttgtatttgataggctgttcatccagttttgtctttttgaaaagtgagtttattttcagcaaggctttatctatgggaatcttgagtgtctgtttatgtcatattcccagggctgttgctgcacacaagcccattcttattttaatttcttggctttagggtttccatacctgaagtgtagcataaatactgataggagatttcccaggccaaggcaaacacacttcctcctcatctccttgtgctagtgggcagaatatttgattgatgcctttttcactgagagtataagcttccatgtgtcccacctttatggcaggggtggaaggaggtacatttaattcccactgcctgcctttggcaagccctgggttctttgctccccatatagatgtctaagctaaaagccgtgggttaatgagactggcaaattgttccaggacagctacagcatcagctcacatattcacctctctggtttttcattcccctcatttttttctgagacagagtcttgctctgtcacccaggctggagtgcagtggcatgatctcagctcactgaaacctctgcctcctgggttcaagcaattctcctgcctcagcctcccgagtagctgggactacaggcgtgtgccaacacgcccggctaattttttgtatttttattagagacggagtttcaccgtgttagccaggatggtctcgatcgcttgacctcgtgatccaccctcctcggcctcccaaagtgctgggattacaggtgtgagccaccgcgcccggcctcattcccctcatttttgaccgtaaggatttcccctttcttgtaagttctgctatgtatttaaaagaatgttttctacattttatccagcatttctctgtgttctgttggaagggaagggcttaggtatctagtttgatacataggtagaagtggaacatttctctgtcccccagctgtcatcatataagataaacatcagataaaaagccacctgaaagtaaaactactgactcgtgtattagtgagtataatctcttctccatccttaggaaaatgttcatcccagctgcggagattaacaaatgggtgattgagctttctcctcgtatttggaccttgaaggttatataaatttttttcttatgaagagttggcatttctttttattgccaatggcaggcactcattcatatttgatctcctcaccttcccctcccctaaaaccaatctccagaactttttggactataaatttcttggtttgacttctggagaactgttcagaatattactttgcatttcaaattacaaacttaccttggtgtatctttttcttacaagctgcctaaatgaatatttggtatatattggtagttttattactatagtaaatcaaggaaatgcagtaaacttaaaatgtctttaagaaagccctgaaatcttcatgggtgaaattagaaattatcaactagataatagtatagataaatgaatttgtagctaattcttgctagttgttgcatccagagagctttgaataacatcattaatctactctttagccttgcatggtatgctatgaggctcctgttctgttcaagtattctaatcaatggctttgaaaagtttatcaaatttacatacagatcacaagcctaggagaaataactaattcacagatgacagaattaagattataaaagattttttttttgtaattttagtagagacagggttgccattgtattccagccttggcgacagagcaagactctgcctcaaaaaaaaaaaaaaaaaggttttggcaagctggaactctttctgcaaatgactaagatagaaaactgccaaggacaaatgaggagtagttagattttgaaaatattaatcatagaatagttgttgtatgctaagtcactgacccatattatgtacagcatttctgatctttactttgcaagattagtgatactatcccaatacactgctggagaaatcagaatttggagaaataagttgtccaaggcaagaagatagtaaattataagtacaagtgtaatatggacagtatctaacttgaaaagatttcaggcgaaaagaatctggggtttgccagtcagttgctcaaaaggtcaatgaaaaccaaatagtgaagctatcagagaagctaataaattatagactgcttgaacagttgtgtccagattaagggagataatagctttcccaccctactttgtgcaggtcatacctccccaaagtgtttacctaatcagtaggttcacaaactcttggtcattatagtatatgcctaaaatgtatgcacttaggaatgctaaaaatttaaatatggtctaaagcaaataaaagcaaagaggaaaaactttggacagcgtaaagactagaatagtcttttaaaaagaaagccagtatattggtttgaaatatagagatgtgtcccaatttcaagtattttaattgcaccttaatgaaattatctattttctatagattttagtactattgaatgtattactttactgttacctgaatttattataaagtgtttttgaataaataattctaaaagc

SEQ ID NO: 21 - DNA, 2593 bp, Homo sapiens
cctctggcggcccgccgtcccagacgcgggaagagcttggccggtttcgagtcgctggcctgcagcttccctgtggtttcccgaggcttccttgcttcccgctctgcgaggagcctttcatccgaaggcgggacgatgccggataatcggcagccgaggaaccggcagccgaggatccgctccgggaacgagcctcgttccgcgcccgccatggaaccggatggtcgcggtgcctgggcccacagtcgcgccgcgctcgaccgcctggagaagctgctgcgctgctcgcgttgtactaacattctgagagagcctgtgtgtttaggaggatgtgagcacatcttctgtagtaattgtgtaagtgactgcattggaactggatgtccagtgtgttacaccccggcctggatacaagacttgaagataaatagacaactggacagcatgattcaactttgtagtaagcttcgaaatttgctacatgacaatgagctgtcagatttgaaagaagataaacctaggaaaagtttgtttaatgatgcaggaaacaagaagaattcaattaaaatgtggtttagccctcgaagtaagaaagtcagatatgttgtgagtaaagcttcagtgcaaacccagcctgcaataaaaaaagatgcaagtgctcagcaagactcatatgaatttgtttccccaagtcctcctgcagatgtttctgagagggctaaaaaggcttctgcaagatctggaaaaaagcaaaaaaagaaaactttagctgaaatcaaccaaaaatggaatttagaggcagaaaaagaagatggtgaatttgactccaaagaggaatctaagcaaaagctggtatccttctgtagccaaccatctgttatctccagtcctcagataaatggtgaaatagacttactagcaagtggctccttgacagaatctgaatgttttggaagtttaactgaagtctctttaccattggctgagcaaatagagtctccagacactaagagcaggaatgaagtagtgactcctgagaaggtctgcaaaaattatcttacatctaagaaatctttgccattagaaaataatggaaaacgtggccatcacaatagactttccagtcccatttctaagagatgtagaaccagcattctgagcaccagtggagattttgttaagcaaacggtgccctcagaaaatataccattgcctgaatgttcttcaccaccttcatgcaaacgtaaagttggtggtacatcagggaggaaaaacagtaacatgtccgatgaattcattagtctttcaccaggtacaccaccttctacattaagtagttcaagttacaggcgagtgatgtctagtccctcagcaatgaagctgttgcccaatatggctgtgaaaagaaatcatagaggagagactttgctccatattgcttctattaagggcgacataccttctgttgaataccttttacaaaatggaagtgatccaaatgttaaagaccatgctggatggacaccattgcatgaagcttgcaatcatgggcacctgaaggtagtggaattattgctccagcataaggcattggtgaacaccaccgggtatcaaaatgactcaccacttcacgatgcagccaagaatgggcatgtggatatagtcaagctgttactttcctatggagcctccagaaatgctgttaatatatttggtctgcggcctgtcgattatacagatgatgaaagtatgaaatcgctattgctgctaccagagaagaatgaatcatcctcagctagccactgctcagtaatgaacactgggcagcgtagggatggacctcttgtacttataggcagtgggctgtcttcagaacaacagaaaatgctcagtgagcttgcagtaattcttaaggctaaaaaatatactgagtttgacagtacagtaactcatgttgttgttcctggtgatgcagttcaaagtaccttgaagtgtatgcttgggattctcaatggatgctggattctaaaatttgaatgggtaaaagcatgtctacgaagaaaagtatgtgaacaggaagaaaagtatgaaattcctgaaggtccacgcagaagcaggctcaacagagaacagctgttgccaaagctgtttgatggatgctacttctatttgtggggaaccttcaaacaccatccaaaggacaaccttattaagctcgtcactgcaggtgggggccagatcctcagtagaaagcccaagccagacagtgacgtgactcagaccatcaatacagtcgcataccatgcgagacccgattctgatcagcgcttctgcacacagtatatcatctatgaagatttgtgtaattatcacccagagagggttcggcagggcaaagtctggaaggctccttcgagctggtttatagactgtgtgatgtcctttgagttgcttcctcttgacagctgaatattataccagatgaacatttcaaattgaatttgcacggtttgtgagagcccagtcattgtactgtttttaatgttcacatttttacaaataggtagagtcattcatatttgtctttgaatca

SEQ ID NO: 22 - DNA, 1500 bp, Homo sapiens
ggttgctctgtaggtcttatctgtaaattacggcgatcagtgaaagatctggaggaggaaggtggacacactctctaacaaaaaaaaccctttttgaaattttataccaatattttaaaagtaaaccagatcttttcagacatgcctttgagctgatatttgttaactagttagaattagaaactttccttatttttactcagttacaatatacgccacagctgaggtgagaggaaagaaaaggttgctttcttaggaacaaagagtggtaccttcagtatcgtgggcaaagcttttccaagtccaacagcagtcaaaacagcgctttttataaataacactcagctaaaagtttctgggtttgtgattgttccaacggttaagctcggatgagggtccctggagtcgtagctcccgggaaacgtcgactggctttccacctggacttcatccgtccaggcagcccagaggggcttcaggccccgcccgctctcctgccaactacagcctcgcgactgcgctcagccttcaggccccgccccttcggtcaagcggcgtgctctcactgcacggcgcctgggccccgcgcgccgggacctcggtttcagccgtcctgtcctgccccgaggcccctaggccccgcccctgggccccgcgcgccaggacttcggtttcgaccgtcctgtcccgccccgaggctcctaggccccgccccctctgtccccggcgtgttctcgcggctccgcccctaggacccgcgcgccgggactttggcaagtttcagccgtccggccccgccccctcggtcccacggctctcgcggcccctcccctaagtcccacacgccgggactttggcaagtttcagcctccagccccacccctaggtcccgcccactcggccagcggctggctctcgcggccccgcccctgtgccctgcgagtccctattttgggagcattgcggccgccgtgccccgcccctccccgcgcgccccgcccctctggcggcccgccgtcccagacgcgggaagagcttggccggtttcgagtcgctggcctgcagcttccctgtggtttcccgaggcttccttgcttcccgctctgcgaggagcctttcatccgaaggcgggacgatgccggataatcggcagccgaggaaccggcagccgaggatccgctccgggaacgagcctcgttccgcgcccgccatggaaccggatggtcgcggtgcctgggcccacagtcgcgccgcgctcgaccgcctggagaagctgctgcgctgctcgcgttggtaaagacggagcttcttgggggtggctgcgagggcacgggtcgcacagtttctgggggcggcagaatcttttcaaatcttccgtttcctccttccgttcccgcgctgcagtcgggtcggcgtgcggttagcacctgccgggggatatagtattaacaacttctgcttctcattcactttatttttgggcgacttaccggcctcccc

SEQ ID NO: 23 - DNA, 1293 bp, Homo sapiens
actacagcctcgcgactgcgctcagccttcaggccccgccccttcggtcaagcggcgtgctctcactgcacggcgcctgggccccgcgcgccgggacctcggtttcagccgtcctgtcctgccccgaggcccctaggccccgcccctgggccccgcgcgccaggacttcggtttcgaccgtcctgtcccgccccgaggctcctaggccccgccccctctgtccccggcgtgttctcgcggctccgcccctaggacccgcgcgccgggactttggcaagtttcagccgtccggccccgccccctcggtcccacggctctcgcggcccctcccctaagtcccacacgccgggactttggcaagtttcagcctccagccccacccctaggtcccgcccactcggccagcggctggctctcgcggccccgcccctgtgccctgcgagtccctattttgggagcattgcggccgccgtgccccgcccctccccgcgcgccccgcccctctggcggcccgccgtcccagacgcgggaagagcttggccggtttcgagtcgctggcctgcagcttccctgtggtttcccgaggcttccttgcttcccgctctgcgaggagcctttcatccgaaggcgggacgatgccggataatcggcagccgaggaaccggcagccgaggatccgctccgggaacgagcctcgttccgcgcccgccatggaaccggatggtcgcggtgcctgggcccacagtcgcgccgcgctcgaccgcctggagaagctgctgcgctgctcgcgttggtaaagacggagcttcttgggggtggctgcgagggcacgggtcgcacagtttctgggggcggcagaatcttttcaaatcttccgtttcctccttccgttcccgcgctgcagtcgggtcggcgtgcggttagcacctgccgggggatatagtattaacaacttctgcttctcattcactttatttttgggcgacttaccggcctccccttgccctgaatccaactgaaacggtagtttttgaacttcagcgggctgaagaaccgtctggaggtgtggctaaaaaaatgttcatcccggtcgcgcctccagagtttgaatcgggctggggtggggctgaggcttctgcattttttacccggccctggattaccccgctgctttccgggagctgtggcgaattgggctggcgggccgccccggagaccctctaaattagaagcagctgccactctaagttaaactggcctttttgacattttctccgtgccagctttttcgag

SEQ ID NO: 24 - DNA, 1057 bp, Homo sapiens
cagtcctggtttattcctgttgtcccagcatcctattcaattatcactcctcttcactctcagaagttttctcatttggatgatacgttatatggtcattctacgtgtgggacacattttgaggtatatggtctacactttgaatcataaggggaagatacaccttagtagttgaaagaagcagccagtagttggttttgccttaagaggtttagagatacttgaacaaaattgttcctttctccaactttctagaaaatacattttaaaatgtattacaacttgtacccagtttggtggttactatttaaaatcatcaggtatgttatggtacaatatttaaccagggagtaacagcctttcaaatgaatgcatccttaataccttctgctttgagaaagtgagaaatatggtagtgttgggccttggatgaaatattgggtgtgagatgtttatctaacaatgactcaaatcttgattgttttaatttcttcaaacagtactaacattctgagagagcctgtgtgtttaggaggatgtgagcacatcttctgtaggtaagtaattacggtttgatgtatatagtacaactgtattttttactagataacaatcatgtaatcttgttgataataatggtacttgatgtttgtgtaactttcaaagtctgcaaagtaacctattgtacattatcttagtttgatctttaaaactgtgtcttaatttacaaataagaaaaccaaagctcaaagaggatgacttgtccaagttacaaagcttagtagacagctttgccaaattggaggaaaaaaattaatgccttttatataattcaaatagatgtttttaaattttccagttaaattttgaatctagactcaaaattgtgaaagtataggtcttacagttattatattagtttcctaaggctgccataacaaagaaccaaaaactgggtggcttagaacaacagaaatgtattgtctctctagttctgtaggctaggagtctaagatcaagatgatgacagggttggttccttctgtgggctgtgagg

SEQ ID NO: 25 - DNA, 1149 bp, Homo sapiens
gataacccaggtaattgagtctacaggttttaaaattgtctgaaaaagtcaaagatcttttcccaaaagctactttaaagccttgagatactagtcccaaaacaaaacagaaggtctttcccagtgtctgcagtagttttgggtattttcatgcaatgttaagatagaaaaagttaggatgcacgactactatgcattaggcattctatctttctgttacatctctgtaacctttagaagctacagatttatttgtagggaaaattatgcagactaataatcaggctaagtaaagtctcttcatagcaaattacatgagcaaccttagatttgatgtatgtattttactctttaaaacagtattcaacaaggatattacaattgaccattgtatgttagaataacctctgctccatttatttctgttcaaactgtttagtttttggaattaaattctgctgaatgggttgcttttttttttttttttaattattttaaagtaattgtgtaagtgactgcattggaactggatgtccagtgtgttacaccccggcctggatacaagacttgaagataaatagacaactggacagcatgattcaactttgtagtaagcttcgaaatttgctacatgacaatgagctgtcaggtaagaactatccctatctctcttagttaaattcatcagttaaaaactgatgaattcatattcataaagtatataaaacatctatctggagttctggaatacgtatttcagattttaaaatctgtaggttttttttttttttttttaaatagccattgagtctctctatgttgtccaagccggacttgaactcctgcactcaagggattccccccacctcagcctccctggtacatgcatgtgacacacccggtggttttttggaagatcattttgagaaatgacgggaaccatagagataattaaagtctaacccccttattttatagttgagaaatcaaggtccagagaggtgaaataaccttgcctacagccgcatgtgtagttagtactagaagctggagaaataaagcccatttctgactgtaaatccaggaacttttttgctgctttacattgcctgctttttacatttatgataacttctgcagaatatatat

SEQ ID NO: 26 - DNA, 1950 bp, Homo sapiens
tttccgtgtaaattttataattgcttgtcgagttttacaaacaagcctactggaaattacattgggatttgttatatctgtaaatctgtttggaacaattggcatcttaacaatattgttatagttcatgaacatggtatatctctccatttgtgtagaattctttaataagtattttgtaattcttagcaaacagaacttatacattctgttagatttgtattttatgggtttttttgggtactatatttggaatataagtttcatgttttgttctctgctatatcttcagtctctaggatatggcacaaagtcggattcagtaagtattgaatgagtgaatatctgctatcaaagagttcacactctaggagctgagaaagaagtacataattaaaagatgatacactttaggggaactgtaaacaaaattcttcgggagctccatgtgggagcaataaatttcatgtaacagatttctttttctttttttctgtcagatttgaaagaagataaacctaggaaaagtttgtttaatgatgcaggaaacaagaagaattcaattaaaatgtggtttagccctcgaagtaagaaagtcagatatgttgtgagtaaagcttcagtgcaaacccagcctgcaataaaaaaagatgcaagtgctcagcaagactcatatgaatttgtttccccaagtcctcctgcagatgtttctgagagggctaaaaaggcttctgcaagatctggaaaaaagcaaaaaaagaaaactttagctgaaatcaaccaaaaatggaatttagaggcagaaaaagaagatggtgaatttgactccaaagaggaatctaagcaaaagctggtatccttctgtagccaaccatctgttatctccagtcctcagataaatggtgaaatagacttactagcaagtggctccttgacagaatctgaatgttttggaagtttaactgaagtctctttaccattggctgagcaaatagagtctccagacactaagagcaggaatgaagtagtgactcctgagaaggtctgcaaaaattatcttacatctaagaaatctttgccattagaaaataatggaaaacgtggccatcacaatagactttccagtcccatttctaagagatgtagaaccagcattctgagcaccagtggagattttgttaagcaaacggtgccctcagaaaatataccattgcctgaatgttcttcaccaccttcatgcaaacgtaaagttggtggtacatcagggaggaaaaacagtaacatgtccgatgaattcattagtctttcaccaggtacaccaccttctacattaagtagttcaagttacaggcgagtgatgtctagtccctcagcaatgaagctgttgcccaatatggctgtgaaaagaaatcatagaggagagactttgctccatattgcttctattaaggtaggatgcttactctgaaataccatctcagaatgaggccaactataaagcaatttctttgcagtttttgaaaaatggcataggattactaggataattaacctttcacagacatgatacttcctctgaaccagagaagccagattcatagggagagcatctctacttcagttggagcagtggcccctgagtctgggcgcatgatcttgtaggagaaaaccaatatttgaatatttcggcttttattttgccaagtgcttttgcttttgtctattttaccttcagtttttatcattttgtttacctgtcttcatgctttatgaatgtagacaattgctaagttattacaggcaacaatgtttacttagtaaaaaagcccatatttaccatccaaattcaaccaaaatttggaaggttgaaagatgtggtctgtacatttctccaatgaccgggacatttgactatcagaaatggctcctccagttcaccacaaaggagct

SEQ ID NO: 27 - DNA, 1081 bp, Homo sapiens
aagcatgactgtacttcttgatatctcagaataatttatacgcagacaatttcttttttgttttgtttttttgagacggagtcttgctctgtggcccaggctggagtgcagtgacatgatcttggctcactgcaacctctgcctcctgggctcaagtgattctcctgcctcagcctcccaagtagctgggattacaggctggcaccaccatgcccgactagttttgtatttttagtagagacggggtttcaccatgttgaccaggctggtctcaaactcctgacctcaggtgatccacccaccttggcctctcaaagtgttgggattacaggcgtgagccaccacacccggcctaataatttattaactcatgaacagtagccttaagagaaaacgatttaagttttactttatattgaagaaggcagcatttaaaaaagctcaatattttcctttctttccttaatgctttttaatttccgttttgttcatttttctagggcgacataccttctgttgaataccttttacaaaatggaagtgatccaaatgttaaagaccatgctggatggacaccattggtagttgtctggtttttattctcattctttctgtgttttacagttcttatagtttatagttatgtagttgtctatatatcatcctctgccacatatactctttttagtctgaagaacttatgttttcatcaagtatgagaacatgattactttccttctagcttttcatttgtgacaggcaagaaattggttaccttttgacagactacctttagatttaggaatccatttgtactgtactgcagaatttagctaatgtctagaggtaacagctacagctgacatcaggctccattctgtagcactgcatgtcactggaaccaaatttcttggaacaaaaagaggtcggaggaactgagtataggaaagtgatcacaaggaagtaattctcactgagggtctatcttagcctcacttataccctatccaattgtagatatataaggcagtagaaatctttgcttacattaaacatttttaaaggtctttgcttattatta

SEQ ID NO: 28 - DNA, 1173 bp, Homo sapiens
tcctactcgtgttatttctcttatcaataacagcagccatacagcaatttgtaggttcagcaaatagcttatcttaaaagcattccttcacggatacttactttgttgcatgatatgtgtatgtactggtacagattttatgtatcatcttgttattaaatatgtagacttttttcttaatgtgttacatttattgtagaacatttaaggagctaccgttggtttaaaactacattttcttctaaaaaacagaaaagtgcttgacccaaggctcaaatgagaatagcctttctttttttatgagttacacagatcttgattgaaagattattaatagtaactttcactctgtcagcaacttatagtgtttttgagtatttaggtaacaataaatttactgcctgacgtttacatttatttttctaaagtgtgatattataatatcatccattgctctttcttatcacttctttcacttctttttcaaaaaatttaattagcatgaagcttgcaatcatgggcacctgaaggtagtggaattattgctccagcataaggcattggtgaacaccaccgggtatcaaaatgactcaccacttcacgatgcagccaagaatgggcatgtggatatagtcaagctgttactttcctatggagcctccagaaatgctgtgtaagtagttcaacgtaaaaattatttttaaaatggacctatattcttgaatcaaggtgtgtgataaagcagactttaaaatagtcaagttgatggctttcttcactttcacaactaaaattagatgtgatcatcacattctgcactcataatcagccttcatgccctttttatgatacagttggtccttcatattcttgggttctacacttgaggattcagccaactgcagatcaaaaataattgggaaatatcaatgacagatcggataaaaaaaatgtgttacatatataccatggaatactatgcaactacaaaaaagaatgagatcatgtttttttgtgggcacatgatggagctggaggccattatccttagtaaactaacgcatgaacagaaaaccaaataccgcatgttctcacttataagtgagagctaaatgatgagaattcatgaacacaaagaagggaacaacagacaccagagtctacttgagtgtg

SEQ ID NO: 29 - DNA, 1109 bp, Homo sapiens
ttgtatgcacacatgtttaaattaatttttaaagtaccctgttaactatattattaaactgtttgttatgtggcataattttccttctagtagaacaaaatccctgtcctgtgaatttatctaattttttattggtttataaagactatatggcctataatagctatagtaaatgatttttattggcatttgaaagtctgtcacttatagtgattggtgattatgaagccatattttaatatgaataagaatgcagaatacagttgtgaaaaattcataatactatattcagtaaaaacaatccctataatctgatgtcaaactgaaattttacatcatttctcctttgagttcagcagcttttgattctagattcttctgcctaatatgagttctgagtaatttattttagttaaaattgtatattattaaggatgttgaaaaattgagtcgagtcacacatttgacttacttaaacacatctgcacttattttaccagtaatatatttggtctgcggcctgtcgattatacagatgatgaaagtatgaaatcgctattgctgctaccagagaagaatgaatcatcctcagctagccactgctcagtagtaagtatggatttagctttgggacatttatatattttattaaaattggttatgaaaggaacataatagaaaaatttccatttgaccaattgcttacattcaccaaacaattattgagcacttcctgagtattagctactgtggattcaaagacataatcacagtacgaccatctagaaatacttattgagcccactctgtattttaggcagcattcataaaacaatgaatatgactggtagaactcttattctcagggaggagcttaccatctggtgagaggtaggaaagagacaaactgtaaatattgaactaatataaataaaataatttcagacacttagacatgagtgtttcgaagatgttgtagagtgtcgttgggtggaggtagtgggcttctgcaaggccattgctttagctagggtcacagagtggagccttaaagcactgatttgaattgaagcctgaatgttgaagtgaggaggctgccaggtgactat

SEQ ID NO: 30 - DNA, 1133 bp, Homo sapiens
gttttgaggggttactattttgatgctaatttgttttctatctttgaggtcagcactgttctagaagccttggcattctttgatttttcagataatctcagtttaaactaaacaagtttgattttaactctattgggacaagttagtggaggtggaatagggaattgctgattttaagtggatattttaagttacttgggaaaagaaaaagacttactggtgactgaatgaagtaaaaccctagagagacccaatttaaaattgaagaaatgagatgccctgggtatagagagctatcacaattgacattttcttgagggaaaaataaagagaaaaaatttatttaaaaggttctgggtgtagattcaatggaaataattgaaaattattagagtaaactaagtaatgaaattcaagcttatatcaagtaacagtctgtttaatgtctttgtctagtcgtctaatgtttttaacactggtatctccttttatattaacagatgaacactgggcagcgtagggatggacctcttgtacttataggcagtgggctgtcttcagaacaacagaaaatgctcagtgagcttgcagtaattcttaaggctaaaaaatatactgagtttgacagtacaggtgaggattttgaattttgggaggtggggtagaaaaaatgttaaatagatgatccttttggagaactacctttgataatttacatatgttttaaccattgggagatggctgtatactttgcatcttgtaatacatctaaattttttttcagtaataaactacttatagacaacaacgtagttaggaaatgtaaagtttaaaggtttgcatatattttaggacaagacagtatttcagaagagcaaatttgtgacttttgctagtgacaaataaattgttgtgcagtgtaatgtcataatcccttagctgtaatttgaaaataaaaatttgtgtttgccaatatggctttaagatatatggtttatgatctgatttttcatattgatggccaggttagagaactagatactaaatagaagtagtcttacacttaagtgtaaaaattgttgcctttgaagattcagatataagcttacaaaatatagatgagttataagaag

SEQ ID NO: 31 - DNA, 1093 bp, Homo sapiens
gaactacctttgataatttacatatgttttaaccattgggagatggctgtatactttgcatcttgtaatacatctaaattttttttcagtaataaactacttatagacaacaacgtagttaggaaatgtaaagtttaaaggtttgcatatattttaggacaagacagtatttcagaagagcaaatttgtgacttttgctagtgacaaataaattgttgtgcagtgtaatgtcataatcccttagctgtaatttgaaaataaaaatttgtgtttgccaatatggctttaagatatatggtttatgatctgatttttcatattgatggccaggttagagaactagatactaaatagaagtagtcttacacttaagtgtaaaaattgttgcctttgaagattcagatataagcttacaaaatatagatgagttataagaagcaggccaaagaaatactttggcttgtatctttctttctcttactgctttttttgtattttagtaactcatgttgttgttcctggtgatgcagttcaaagtaccttgaagtgtatgcttgggattctcaatggatgctggattctaaaatttgaatgtaagtgttggatttgagagaattaagaaatgaattagactagttttgtttttcatggttattaatgcctgtgattaaggaacttgatgttaattttcttacctctggttagtcactgcattttggaaaagcttctggctgggcgtggtggctcaagcctgtaatcccagcactttgggaggcccaggtgggcggatcacaaggccaggagatcgagatcatcctggctaacacggtgaagccctgtctctactaaaaatacaaaaaaattagccgggcgtggtggcgggcgcctgtagtcccagctacttgggaggctaaggcaggagaatggcgtgaacctgggaggtggagcttgcagtgagccaagatggtgccactgcactccagcctgggcaacagaatgagactctgtctcaaaaaaaagaaaaaaagaaaaagcttctcatatttatggtgtcatttagatgtccttagtaaatgtatatacatatgttctg

SEQ ID NO: 32 - DNA, 1098 bp, Homo sapiens
tgagcttggtgctgtagactaaagcacattccttcatgtcaaatcacttacagtttaacagacgattagacatataactgtcaaaatgagcagtatagatggtaagtgctcagtttaggttattgtgtcatggactttttattcaccttaattttgggtaattgctatgagtggaaatgtagacttttatttttgtctttgaaatagtatcctggcttaggtttttcagaaaggagattaaaattacagttagtgttcagtactaacttatggcttaatcctccaaagaaagagttttttaaaatattttctttatatgggaaaaccagttgtattacattttgttttggcataagtaagatttctgtttgcattttagaataatacttaaaaactgccatgaagaagaaaaaccacttaggtaaattgcttgattttaatgagagagatatagtgctcacttgatacttagtttgctttaattcttgtgtttttgtcaggggtaaaagcatgtctacgaagaaaagtatgtgaacaggaagaaaagtatgaaattcctgaaggtccacgcagaagcaggctcaacagagaacagctggtatttttcttttaatacaactttcattgttcttattatgacatactattattatcaccatcaggaagaacttctgccctttcaacagctacaggtgactgattaaaattttaattgtgcttatttcaagcacttgattctgaaagatgatcacgatgagcagtaaaatccagaaggtaataatttcatactgttaatggatttttggcatcttgaacattgccataaacctttcagaatctgaggtaaatctcagatacaggaagtagcttgaaagaagacttacagctgctgcttggatttagttaccatatgtctctatggccacatattgtagctttaatggataatatcgcattatcctgttgatattatataagtatattagaagtcacaaagaaaatttccatagaagggaattatgaaactttttttatttccaacgagcatacggaagtatgtttcatagctaattggatccctagcctcagcacaaaaat

SEQ ID NO: 33 - DNA, 1458 bp, Homo sapiens
ttagtatgcttgaaatataacttgtcccagcacctcattaagtagcttcttagctgctcataattgttacagatggagcattcctaatccaacatctaaaatgctccaaaatccaaaactttttgagctttgacatgatgccacaagtggaaaattccacacctgacctcatgtgacaggtcacggtcagaacacagtcaaaattttgtttcatgcacaaaattactgaagatattgtataaaattacttcaggctatgtgcataaggtgtacaagaaacaaacgaattttgtgtttaggcttgagcctcatccttaagatacctcatgtatatgcaaattttccaaaacccaaaaaatttatgaatctgaaatgcttctcctccaaatgtttcaggtaagggatattcaacttgtatttttattttcctcattcatatacagtgtttttgaatacagtattttgatctgcctttaacaaatgttttctcattatttcagttgccaaagctgtttgatggatgctacttctatttgtggggaaccttcaaacaccatccaaaggacaaccttattaagctcgtcactgcaggtgggggccagatcctcagtagaaagcccaagccagacagtgacgtgactcagaccatcaatacagtcgcataccatgcgagacccgattctgatcagcgcttctgcacacagtatatcatctatgaagatttgtgtaattatcacccagagagggttcggcagggcaaagtctggaaggctccttcgagctggtttatagactgtgtgatgtcctttgagttgcttcctcttgacagctgaatattataccagatgaacatttcaaattgaatttgcacggtttgtgagagcccagtcattgtactgtttttaatgttcacatttttacaaataggtagagtcattcatatttgtctttgaatcaaaaaaaaaaaaaaagtctaatgccagattaggaattcatgttatgtttaccatttagaagctgggattgcttttaaaggtttttctttttaaaattggcatgtttttgatttatcatgtctttctattcagattattgggtatcaaagattaatgaggacaccagaatcttggttaaatagacaagtggtatcattactgtttgagtcttttaatattctccatacctgccaccagtgaaaaaacttgccttttttttttttttttttttagtaaacagaatattatcaaacaatttattttggctttattgaaaaaagagtatttggtctaaatgtgccaccataggtgttaaattctcctatctgcaattgtctttatcctatattgtgttcatttcttttcttaataatttactttgttgtgtgtttctacactttcatccctgttttttatcttgtatatcatcaggaaattgtgatttaatcattaacattggttt

SEQ ID NO: 34 - DNA, 1500 bp, Homo sapiens
tattttgatctgcctttaacaaatgttttctcattatttcagttgccaaagctgtttgatggatgctacttctatttgtggggaaccttcaaacaccatccaaaggacaaccttattaagctcgtcactgcaggtgggggccagatcctcagtagaaagcccaagccagacagtgacgtgactcagaccatcaatacagtcgcataccatgcgagacccgattctgatcagcgcttctgcacacagtatatcatctatgaagatttgtgtaattatcacccagagagggttcggcagggcaaagtctggaaggctccttcgagctggtttatagactgtgtgatgtcctttgagttgcttcctcttgacagctgaatattataccagatgaacatttcaaattgaatttgcacggtttgtgagagcccagtcattgtactgtttttaatgttcacatttttacaaataggtagagtcattcatatttgtctttgaatcaaaaaaaaaaaaaaagtctaatgccagattaggaattcatgttatgtttaccatttagaagctgggattgcttttaaaggtttttctttttaaaattggcatgtttttgatttatcatgtctttctattcagattattgggtatcaaagattaatgaggacaccagaatcttggttaaatagacaagtggtatcattactgtttgagtcttttaatattctccatacctgccaccagtgaaaaaacttgccttttttttttttttttttttagtaaacagaatattatcaaacaatttattttggctttattgaaaaaagagtatttggtctaaatgtgccaccataggtgttaaattctcctatctgcaattgtctttatcctatattgtgttcatttcttttcttaataatttactttgttgtgtgtttctacactttcatccctgttttttatcttgtatatcatcaggaaattgtgatttaatcattaacattggtttttttgtgtgtgtggtaaaaatcaacactaggctcatggtacatatttttattctgtacatttgcttgtaactatcaatttgtaactctgtttatctactacatgtgtatatatacttagagcattttctctaacacattttaatgttagtattttttaaaaggtctgaccagtctagcaaattgtcagtccaacgtcattactttaaattaagaagcagtcttcttctggtaaaccttgttggtatttgtaaaataattttgaaggtcttaatttcttcctttgtaaaaggaaaaggttttttttaaagtttttaggttggcatggaggcagaagttggtgattacttgatttacaacagattttttccagatcatacaaaaggccatacagtaagtatagaagtaggtatggggagggcttactaatatcaaataggcaaggccttagtgagtgggcaggataccacctgagagtggccagatgtggggaggttactct

SEQ ID NO: 35 - DNA, 4528 bp, Homo sapiens
ggcgggaagtgagccagggcttggcgcggcggccgtggttgcggcgcgggaagtttggatcctggttccgtccgctaggagtctgcgtgcgaggattatggctgctgttcctcaaaataatctacaggagcaactagaacgtcactcagccagaacacttaataataaattaagtctttcaaaaccaaaattttcaggtttcacttttaaaaagaaaacatcttcagataacaatgtatctgtaactaatgtgtcagtagcaaaaacacctgtattaagaaataaagatgttaatgttaccgaagacttttccttcagtgaacctctacccaacaccacaaatcagcaaagggtcaaggacttctttaaaaatgctccagcaggacaggaaacacagagaggtggatcaaaatcattattgccagatttcttgcagactccgaaggaagttgtatgcactacccaaaacacaccaactgtaaagaaatcccgggatactgctctcaagaaattagaatttagttcttcaccagattctttaagtaccatcaatgattgggatgatatggatgactttgatacttctgagacttcaaaatcatttgttacaccaccccaaagtcactttgtaagagtaagcactgctcagaaatcaaaaaagggtaagagaaacttttttaaagcacagctttatacaacaaacacagtaaagactgatttgcctccaccctcctctgaaagcgagcaaatagatttgactgaggaacagaaggatgactcagaatggttaagcagcgatgtgatttgcatcgatgatggccccattgctgaagtgcatataaatgaagatgctcaggaaagtgactctctgaaaactcatttggaagatgaaagagataatagcgaaaagaagaagaatttggaagaagctgaattacattcaactgagaaagttccatgtattgaatttgatgatgatgattatgatacggattttgttccaccttctccagaagaaattatttctgcttcttcttcctcttcaaaatgccttagtacgttaaaggaccttgacacctctgacagaaaagaggatgttcttagcacatcaaaagatcttttgtcaaaacctgagaaaatgagtatgcaggagctgaatccagaaaccagcacagactgtgacgctagacagataagtttacagcagcagcttattcatgtgatggagcacatctgtaaattaattgatactattcctgatgataaactgaaacttttggattgtgggaacgaactgcttcagcagcggaacataagaaggaaacttctaacggaagtagattttaataaaagtgatgccagtcttcttggctcattgtggagatacaggcctgattcacttgatggccctatggagggtgattcctgccctacagggaattctatgaaggagttaaatttttcacaccttccctcaaattctgtttctcctggggactgtttactgactaccaccctaggaaagacaggattctctgccaccaggaagaatctttttgaaaggcctttattcaatacccatttacagaagtcctttgtaagtagcaactgggctgaaacaccaagactaggaaaaaaaaatgaaagctcttatttcccaggaaatgttctcacaagcactgctgtgaaagatcagaataaacatactgcttcaataaatgacttagaaagagaaacccaaccttcctatgatattgataattttgacatagatgactttgatgatgatgatgactgggaagacataatgcataatttagcagccagcaaatcttccacagctgcctatcaacccatcaaggaaggtcggccaattaaatcagtatcagaaagactttcctcagccaagacagactgtcttccagtgtcatctactgctcaaaatataaacttctcagagtcaattcagaattatactgacaagtcagcacaaaatttagcatccagaaatctgaaacatgagcgtttccaaagtcttagttttcctcatacaaaggaaatgatgaagatttttcataaaaaatttggcctgcataattttagaactaatcagctagaggcgatcaatgctgcactgcttggtgaagactgttttatcctgatgccgactggaggtggtaagagtttgtgttaccagctccctgcctgtgtttctcctggggtcactgttgtcatttctcccttgagatcacttatcgtagatcaagtccaaaagctgacttccttggatattccagctacatatctgacaggtgataagactgactcagaagctacaaatatttacctccagttatcaaaaaaagacccaatcataaaacttctatatgtcactccagaaaagatctgtgcaagtaacagactcatttctactctggagaatctctatgagaggaagctcttggcacgttttgttattgatgaagcacattgtgtcagtcagtggggacatgattttcgtcaagattacaaaagaatgaatatgcttcgccagaagtttccttctgttccggtgatggctcttacggccacagctaatcccagggtacagaaggacatcctgactcagctgaagattctcagacctcaggtgtttagcatgagctttaacagacataatctgaaatactatgtattaccgaaaaagcctaaaaaggtggcatttgattgcctagaatggatcagaaagcaccacccatatgattcagggataatttactgcctctccaggcgagaatgtgacaccatggctgacacgttacagagagatgggctcgctgctcttgcttaccatgctggcctcagtgattctgccagagatgaagtgcagcagaagtggattaatcaggatggctgtcaggttatctgtgctacaattgcatttggaatggggattgacaaaccggacgtgcgatttgtgattcatgcatctctccctaaatctgtggagggttactaccaagaatctggcagagctggaagagatggggaaatatctcactgcctgcttttctatacctatcatgatgtgaccagactgaaaagacttataatgatggaaaaagatggaaaccatcatacaagagaaactcacttcaataatttgtatagcatggtacattactgtgaaaatataacggaatgcaggagaatacagcttttggcctactttggtgaaaatggatttaatcctgatttttgtaagaaacacccagatgtttcttgtgataattgctgtaaaacaaaggattataaaacaagagatgtgactgacgatgtgaaaagtattgtaagatttgttcaagaacatagttcatcacaaggaatgagaaatataaaacatgtaggtccttctggaagatttactatgaatatgctggtcgacattttcttggggagtaagagtgcaaaaatccagtcaggtatatttggaaaaggatctgcttattcacgacacaatgccgaaagactttttaaaaagctgatacttgacaagattttggatgaagacttatatatcaatgccaatgaccaggcgatcgcttatgtgatgctcggaaataaagcccaaactgtactaaatggcaatttaaaggtagactttatggaaacagaaaattccagcagtgtgaaaaaacaaaaagcgttagtagcaaaagtgtctcagagggaagagatggttaaaaaatgtcttggagaacttacagaagtctgcaaatctctggggaaagtttttggtgtccattacttcaatatttttaataccgtcactctcaagaagcttgcagaatctttatcttctgatcctgaggttttgcttcaaattgatggtgttactgaagacaaactggaaaaatatggtgcggaagtgatttcagtattacagaaatactctgaatggacatcgccagctgaagacagttccccagggataagcctgtccagcagcagaggccccggaagaagtgccgctgaggagctcgacgaggaaatacccgtatcttcccactactttgcaagtaaaaccagaaatgaaaggaagaggaaaaagatgccagcctcccaaaggtctaagaggagaaaaactgcttccagtggttccaaggcaaagggggggtctgccacatgtagaaagatatcttccaaaacgaaatcctccagcatcattggatccagttcagcctcacatacttctcaagcgacatcaggagccaatagcaaattggggattatggctccaccgaagcctataaatagaccgtttcttaagccttcatatgcattctcataacaaccgaatctcaatgtacatagaccctctttcttgtttgtcagcatctgaccatctgtgactataaagctgttattcttgttataccatttgaagtttttactcgtctctattaatatttaaataaatgctggggggtgatagttcttctttttaaaataaacattttcttttgaa

SEQ ID NO: 36 - DNA, 1500 bp, Homo sapiens
agaaattctgatacatgctacaacatagatgctccttgaagacattatgctaagtgaaataagccaatcagaaaagagcaattattgtatgattcaatttatatgcggtacctcgcacttacagacagaaagtgcaatatcggctataaggggttgtgagaaacgggtaacggggagttactgtgtaacaggcagattttctatttgggataatgaaaaagttctggagatggatagtggtgatggtttcacaacaatgtgaatgtacttaatgccagtgaactgtacacttaaaaatggtgaattttatgttagatagattttatcacacacacaaagaggagggagggcgggagggaaggagagagggaaggaagtagagaggggagaagagaggaagaaaggaaagaaagtaagatctggcatcacagggcccacattcccgcgtgtcagcaataggctgaaacagaagcatggtttctcacgtgtccatggaggcatctgagtgtgtgcccactttcccggttcaatgacaatttgcacctgctcgtgtagaggggtacgggtgaaacagagaccagtattattaaggggatggagaggagagaccgccaaaacatcgcagagacacaccgtcggaaccaagagaatggggtgcagacgcctggcttggcctgtgggaactggcaagtctcagctctcaaacgcccgggcttttcaacccgccacagccgggttccagctgcctacttcctttaaagccttcaccgactctaaaacaccaaaaacaaagacccaactagctccggaagcccgagatgtaaccgtagtcatctgaccctcccgtccggactctgattgggctttggagatacgcgtccctcccggcgctgtacggcgaccccgccccagcagcctgagggggcgggaacagatgtccgagtgcgacagtattggtcggcttccccaggaagcagccaatcggaataggcaagcttccggcgggaagtgagccagggcttggcgcggcggccgtggttgcggcgcgggaagtttggatcctggttccgtccgctaggagtctgcgtgcgaggtgagtaccgcgcgcgtaactacgggtcggtccgcattgatctagccctgctctggcggcccggcccggagctggaggccgctcgggttcttccgtttcctgcactggttcgcctcggcccgctgagtcctctagtctggccaacatcctgggaggacagcagatacataaatacgttcccaaatggggaaacagaggcccggggcgggggcgaactctgccaaggtctcccggggcgtcggaggccgagcatgggctaggacctggcatgttgttgcccatatactccagtgcgtaacatgatgccctgcacagagtaatcccagcccagacctctggcactactacctccgtgtccctcctgaggaacaacgaaaacactttgtactttttctgtggccttccat

SEQ ID NO: 37 - DNA, 1093 bp, Homo sapiens
tctgagtgtgtgcccactttcccggttcaatgacaatttgcacctgctcgtgtagaggggtacgggtgaaacagagaccagtattattaaggggatggagaggagagaccgccaaaacatcgcagagacacaccgtcggaaccaagagaatggggtgcagacgcctggcttggcctgtgggaactggcaagtctcagctctcaaacgcccgggcttttcaacccgccacagccgggttccagctgcctacttcctttaaagccttcaccgactctaaaacaccaaaaacaaagacccaactagctccggaagcccgagatgtaaccgtagtcatctgaccctcccgtccggactctgattgggctttggagatacgcgtccctcccggcgctgtacggcgaccccgccccagcagcctgagggggcgggaacagatgtccgagtgcgacagtattggtcggcttccccaggaagcagccaatcggaataggcaagcttccggcgggaagtgagccagggcttggcgcggcggccgtggttgcggcgcgggaagtttggatcctggttccgtccgctaggagtctgcgtgcgaggtgagtaccgcgcgcgtaactacgggtcggtccgcattgatctagccctgctctggcggcccggcccggagctggaggccgctcgggttcttccgtttcctgcactggttcgcctcggcccgctgagtcctctagtctggccaacatcctgggaggacagcagatacataaatacgttcccaaatggggaaacagaggcccggggcgggggcgaactctgccaaggtctcccggggcgtcggaggccgagcatgggctaggacctggcatgttgttgcccatatactccagtgcgtaacatgatgccctgcacagagtaatcccagcccagacctctggcactactacctccgtgtccctcctgaggaacaacgaaaacactttgtactttttctgtggccttccataatcacgagctgggctactcttgtttttgagtgtctactgtgtgccatgttcctggcacccttgatcttacaactgtagctttacgatatccc

SEQ ID NO: 38 - DNA, 1102 bp, Homo sapiens
cttgctggtaaacctttgctctcattggtggtggtgttcctcctttccccagttctgcccttgtgcagaattcagttattcatttgttctttgggctttccgtgtgctttgatcatttcctcccacctcgctcccttccagctttcatttatccttccaggccaggtcccatttttctaaaagccctttcctaataatcccctccctaatgtcttttgtacttattttagcattgtggaggaagagagggggaacctggttattctgttattcaagtgagccttcagttagttgaagattatatatttcaagtgtcactagttgtaaatgtcaaaacagtctattgaccaaaaaaaaaaaaaaaaaaaaaaaaaagtcctattactctgggcacagttggaacaatgcctgtttgaatcaagtccttcctcccctcaaaaaacattgtgattaatgcaaagtacctaactccactgatttctttttccctcactttttaggattatggctgctgttcctcaaaataatctacaggagcaactagaacgtcactcagccagaacacttaataataaattaagtctttcaaaaccaaaattttcgtaagtgttttgactggtttgctgtcacataggcactaacttaccacattgtacacatgagatatcttctctttaaactcccccattgtacagatgaggaaatgaagctgagagattcattgattttcccactttgccaattaatggtagagtatgttttagcagcaccaggtgagattgtgtctcatctttgcatggttcctggcacataatatttgctcaataaagatttgttgagtaaatgaataattgatcttgtaaatttgggcaaataagtgttttttaagttttggggggtttttttgtttgttttgttttgttttgttttttcttttgagacggagtctcgctctgtcgcacaggctggagtgcagtggcgcgatcttggctcactgcaagctccgcctcctgggttcacgccattctcctgcctcagcctcccgagtagctgggactacaggcacctgccaccacgcctggctaatttttttttgtatttt

SEQ ID NO: 39 - DNA, 1701 bp, Homo sapiens
cctgcctcagccttctgactagctagggcttcaggcatacaccactatgcccggctaattttttgtgtttttattagaggtggggtttcaccatgttggccaggctggtctcgaactcctgacctcaagcattccacctgcctcggcctcccaaagtgctgggattacaggcatgagccactgcacccggcctcttccctttttcatttatgctgtcaccccgctctggagatgctattaactaaggactactagcctgagaaataaagtagtgggaatgacctctcaaagccaaataattagcctctgaatgggaaggaccagagaacgaatacaatttaagttacctgataaatttaaaatcgagagagatggattctttgctcagttgggatacaattaatgtaacctgtgtgaattagtttaaaaaattagttttgtagagttggggggtttcttaaaatggatccatctaatctagtttttccattatttttcagaggtttcacttttaaaaagaaaacatcttcagataacaatgtatctgtaactaatgtgtcagtagcaaaaacacctgtattaagaaataaagatgttaatgttaccgaagacttttccttcagtgaacctctacccaacaccacaaatcagcaaagggtcaaggacttctttaaaaatgctccagcaggacaggaaacacagagaggtggatcaaaatcattattgccagatttcttgcagactccgaaggaagttgtatgcactacccaaaacacaccaactgtaaagaaatcccgggatactgctctcaagaaattagaatttagttcttcaccagattctttaagtaccatcaatgattgggatgatatggatgactttgatacttctgagacttcaaaatcatttgttacaccaccccaaagtcactttgtaagagtaagcactgctcagaaatcaaaaaagggtaagagaaacttttttaaagcacagctttatacaacaaacacagtaaagactgatttgcctccaccctcctctgaaagcgagcaaatagatttgactgaggaacagaaggatgactcagaatggttaagcagcgatgtgatttgcatcgatgatggccccattgctgaagtgcatataaatgaagatgctcaggaaagtgactctctgaaaactcatttggaagatgaaagaggtaacaattattttatcttcattttagtatgttcattgtacttttttattcaaagctagccattgggaatagtcatgaatatatagagcttttgtccttaaggttgttagggtctttagtggtgctttttgaataatctgttggccacatttttgaggcaggacgtactgatgaaatggaaggttttagtctgctaatatagtttccaggatagctctgtgattttatacatgaagaaaatacaggagtttccccttgtccacagctttgcattctctgaggtttcagttacccgcagccggctgaggtctgaaaatattgcatcacttctcttgcgctttgggaccattattaagaaaacacaagccctgcaataccgcgacagtcaatctgataactgagaccactactaagtgattaacagcaacccaggtggacagatcaggtcggggcaagattttatcacactatactcaaaacagcttgaaactgaacactta

SEQ ID NO: 40 - DNA, 1160 bp, Homo sapiens
tgatgcctctgtttctgaagggaaaatttgttaaaagatagacagcaacaatttgggttgtgttttcccacatagtccaaaagagagacttaaataactgggaaactttgtgttaaagatgatttgtacaagcagccgtgtttgtgttattatcagacttatctgttgcactttacccttatttaaatatgagtgaaaagttaaaaactagaaacgtcaatagcaaatacgtgtttcgtaattaaccagagacagacatgaaaatccctaagcaaatcttcggcctcagtcgagcattcactggacttaatccacttgactcaatagtaatcatttatgaataaataagccagcattagcatgtaaagggagaggatccatacaaagtggtgtgattgtttgtgacttgccagaagcactcattcttaatcgctcatgccctgttctttctgtctcattagtggttaacaaatctatgtttatcaactgttttactgtagataatagcgaaaagaagaagaatttggaagaagctgaattacattcaactgagaaagttccatgtattgaatttgatgatgatgattatgatacggattttgttccaccttctccagaagaaattatttctgcttcttcttcctcttcaaaatgccttaggtaaactagctaaataattagcattattatttgtttctgggatactttaaattgtttaatttagtttataatatcatttctatataaaagtattttgtgctttctacaattattttacattcaagtgaaagcctcaaaaaaaaaccctgtttatacatttaattggttgcattctaaagatgaagtcccattatgattaattacatgaaacttcaaacaattttaggtagctgatttttttttttttttgagacagtctcgctctgtcacccaggctggagtgaagtggtatgatcttggctcactgcagcctccacctcccgggttcaagtgattcttgtgcctcagcctcccaggtagctggaactacaggtgcacaccaccatgcctggctaattttttgtattttcagtagagacgaggttttgccatgttgcccaggctagtcttgaacccctgagctcaggcaatccgcccgccttggcctcccaaagtgctag

SEQ ID NO: 41 - DNA, 1128 bp, Homo sapiens
tatatgcagacacacaaaaacacatgtacatatatttgcataataagagaagtccagaaaaagtgctttgaaatctcagaaaaaagagacattaataatcacttgctggagaagtaatgctttggctggggctagaagaacaggtgtgatttgggtacgaagagattggaatggcaggttttccaaattgagaggatcagtggcaaaatccccaaaataggcaatgcagggcttatatgaagaatgtaagtggtacagtatgactgaagatttgtgttactgaaaggacataatcggagataatgttgaaaagggctctttctggacaactttgaggaccagctaaagaagttttataattgaggaaatttaaaaaactacttctcttttctgttatatattgtctgatcagtggtagaaaaatattaagggtttcaaaattatacatttattgagtctagcctatagtatgattggcttaacattttttttatttgcagtacgttaaaggaccttgacacctctgacagaaaagaggatgttcttagcacatcaaaagatcttttgtcaaaacctgagaaaatgagtatgcaggagctgaatccagaaaccagcacagactgtgacggtacaagcaatattttagacataccatgtatttcaactacttacttttgaaaacaacgtaacacaaagattgtgttttgaacctgtggctgtatgttataaaatggcagatttgtagtttcttttcttctaatgtcataaccttgtttactggttagccagcatttgcctgaacaactcatgaactcatgctctcacaagggcgttcattccccattttgaaaatgctacttgttagaaatcatctctcatactgagccaagatctgcaactttaattctaggaggtttttaaatttttatttacaaatgagaacttccacaaaatcctgtgtttcagaaacacggaccacagagcgtaatctcatcataatagagtttccctccccctccttgactaaatattattaggtcttttaactctccttgctagaaattgctttcttgacctttcatcctccggttctcccttgtatatactctgagtctaggtctgggtctt

SEQ ID NO: 42 - DNA, 1133 bp, Homo sapiens
cccaggctggagtgcaatggcacgatctcagctcactgcaacctccacctcccaggttcaagcgattctcctgcctcagcctcccgagtagctgggattacagacacgcaccaccatgcccggctaatttttatattattagtaaagacggggtttcaccacattggccaggctggtctcgaactcctgacctcaggtgatctacccttcttggcctcccaaagtgttgggattacaggcgtgagccaccgtgcccagccccactttaaaaaaaaaaaaaaaaaagaaaaagaaatcaagatcttaagacttttttttttttttttagtgacagggtctcactgtgttgcccaggctggtcttgaactcctggacttaagcaatcctcctgccttggcctccccaaagggctgggattacagtcatgagccaccatgcctagccaagacttttttttttttccctcaaagaaaaatattaacaacataattattttatagctagacagataagtttacagcagcagcttattcatgtgatggagcacatctgtaaattaattgatactattcctgatgataaactgaaacttttggattgtgggaacgaactgcttcagcagcggaacataaggtatcttaattttcccccttctggaatatatctgattatatttctaccactctaagtgaaaaatggacagggcaaaatgttcaggctttctggcctggaaatggcataaggatgatcatcatgccactatgtttttgatttgtttacttttcaaaccactcctttaacattcgtattcatgtttttaagattgggaaaaaagcgaatatattttgctacaatttctatttggtatgaaaactacagatttgcttttgtggcctaccagagtaaactacttatatttaatacgttgttctcttttctctcttcagaaggaaacttctaacggaagtagattttaataaaagtgatgccagtcttcttggctcattgtggagatacaggcctgattcacttgatggccctatggagggtgattcctgccctacagggaattctatgaaggagttaaatttttcacaccttccctcaaattctgtttctcctggggactgttt

SEQ ID NO: 43 - DNA, 1662 bp, Homo sapiens
acttttttttttttccctcaaagaaaaatattaacaacataattattttatagctagacagataagtttacagcagcagcttattcatgtgatggagcacatctgtaaattaattgatactattcctgatgataaactgaaacttttggattgtgggaacgaactgcttcagcagcggaacataaggtatcttaattttcccccttctggaatatatctgattatatttctaccactctaagtgaaaaatggacagggcaaaatgttcaggctttctggcctggaaatggcataaggatgatcatcatgccactatgtttttgatttgtttacttttcaaaccactcctttaacattcgtattcatgtttttaagattgggaaaaaagcgaatatattttgctacaatttctatttggtatgaaaactacagatttgcttttgtggcctaccagagtaaactacttatatttaatacgttgttctcttttctctcttcagaaggaaacttctaacggaagtagattttaataaaagtgatgccagtcttcttggctcattgtggagatacaggcctgattcacttgatggccctatggagggtgattcctgccctacagggaattctatgaaggagttaaatttttcacaccttccctcaaattctgtttctcctggggactgtttactgactaccaccctaggaaagacaggattctctgccaccaggaagaatctttttgaaaggcctttattcaatacccatttacagaagtcctttgtaagtagcaactgggctgaaacaccaagactaggaaaaaaaaatgaaagctcttatttcccaggaaatgttctcacaagcactgctgtgaaagatcagaataaacatactgcttcaataaatgacttagaaagagaaacccaaccttcctatgatattgataattttgacatagatgactttgatgatgatgatgactgggaagacataatgcataatttagcagccagcaaatcttccacagctgcctatcaacccatcaaggaaggtcggccaattaaatcagtatcagaaagactttcctcagccaagacagactgtcttccagtgtcatctactgctcaaaatataaacttctcagagtcaattcagaattatactggtaagtttaaaataaattgaatgcttatatgaaaacaaaactgtcccaaaataggaattatataagaaaaaccatagcaaatcatcattgcctgaaaacattgttgctatgcaaatttctactgatgatatgaattacaaatcacaatttcaaaagcaagttgctcttttgtctctatagcagctgtagttttataaaatgtgtaattataacctattgtagtacggctctaaagtcattacaaatgtgatgtgcctttgaattaacattttttagttcctaaaacaaactcatgagggccaagtttttaatgattttgggatgggcaaaagcaaaaatggattcgcatgctaaaaatgtattttagaattctgtactgatgagaatcgattaatacaaagtagagaagcatgttttatgtgttaaaatgttaaaatatagggtagtctataaaggatatgaagtcaggagtgtcttaaatcagtcaaactacttctttg

SEQ ID NO: 44 - DNA, 1192 bp, Homo sapiens
tgtgcaggactggaacttaggagggtgtcagttgggtcttaagagaggtgtaggcatttgctgcacacgggtcatgtttaagatcataggactaggaaagctccaaaaaagaatgtctacagagcccagtcccaaatatctgaaagactccctcccctatttatggggcagatggaggtagtagagccaggaaagggaatttaaaatgagtagaaaaccatgattgtcttggtggtcatggttggaggaagggagaagaggaaggaaagaataaaagtagtggtaggtgctgtagaaaaagtcaaggaaatacttgatttgggactttggcaagtttttggtggctttgagacttgtagggaaggaaagccagtaaagagtttaagaactgtgctgcagggaaacgtgtgccagtgattctgcagggcaagggaaatgctaaagctgtactttcactgtattcatgtactgatttttcttaacgttgattattttcctagacaagtcagcacaaaatttagcatccagaaatctgaaacatgagcgtttccaaagtcttagttttcctcatacaaaggaaatgatgaagatttttcataaaaaatttggcctgcataattttagaactaatcagctagaggcgatcaatgctgcactgcttggtgaagactgttttatcctgatgccgactggtatgtatttttagaagtgaattggcaggaatccattggcagatgttaaatgaaagctctttaatagaaataaaaagaccacctacacagtatttctatcatttagggacctcttaaacctcctgtaccatagtgagaaagcatattactttatatcctttgttctggttgttgacatcatgaagtttatagccctgtaagattttcaactcgaagctcattgtgttgaactgatctagaatttttctttgggaatttttcttttttctagtctaagcagttttggaaatcaaacagaaaaatcgctgtcagagaccatgaccatttctggcagtttatttgcaacaatctggtgttgcatagtggttaaatcatatatgcatatatgcatagtggtccatcagctatggaccaaaggcctggacttaaagaacagctctgctgctcacagcagtgtggccacatgcaaggcactttactccctgggcccattttctcat

SEQ ID NO: 45 - DNA, 1119 bp, Homo sapiens
cctaggccgggcgcagtggcttgtgcctataatcccagcactttgggaggctgaggcaggtggattacctgaggtcaggagttcaagaccagcctggccaatgtctctactaaaaatacaaaaattagcaggatgtggtggtgcatgcctatagtcctagctactggggagggtaaggcatgacaattgcttgaacctgggaggtggagattgtagtgagctcagatggcaccactgcactccagcctgggcaacagaatgagactctgtctcaaagacaaaaacaaaaacaaaaaaaacactttttttttaaagatcatttttacacattatttaaattgcctaaatataatagtttgagtcatttgagtatggcaaattgttggcaccagggacaatatgccttggtgtcctattaatgatatgatttcttttgtaacttttacattcatgctctgaagacagaacctgacagatattttttcattgttctctttcaggaggtggtaagagtttgtgttaccagctccctgcctgtgtttctcctggggtcactgttgtcatttctcccttgagatcacttatcgtagatcaagtccaaaagctgacttccttggatgtaagttataaaaatactaataaaaacacgccttagaaacaattaaatttcagtcctctggataacctttttattaaatagttcgtgatttgtaaaaaataaagcacagcagttaaatttgcagttgaacagaagtctgaaaatttgatacagataacctctagttcaatctgtttttattctacaagaatgtatcttagtaagaacttttaaccaatgctattttttgctgatgtaaatttttttaacgaatagaaaatcatttcttttttcagtactgccaggtcggcatagttctctttcccttatatcttaaagtgcatacacacatgcatgcctgcacacatatatctttttttctcatggctgagtttaaggaagtaaatgaatgcattctacttaactcttcacaatgtagttgggggtggtggctcatgcctgtaatcccagtgacttggaaggcaaaggtgggaggattgcttgaggccaagaattcaaga

SEQ ID NO: 46 - DNA, 1114 bp, Homo sapiens
tgtgttatgcttttttttgttttgttttgttttgttttaagacagtcttgttctgttgcccaggctggagtgcggtggtgcaaccttggctcactgcaacctctgcctcccaagctccagcaattttcctgccttagcctcctgagtagctggaattacaggcacctgccaccacgccaggctaatttttgtattttcagtagagatggggtttctccgtgttggccatgctagtcttgaactcctgaccccaagtgatccacctgcctcagcctcccaaaatgctgaaattacaggcgtgagccaccacgccctgcctgagttatgcttaataagggttttttaaaatgtatgtacttacatacttgttatgttgagatatgtatttcctttgataggtttgatatgtgactaataaaatatttataaaacctaaggacaaatgtaattttgtcaggttaatgtataaaattgaaattgtttactacttttatacttagattccagctacatatctgacaggtgataagactgactcagaagctacaaatatttacctccagttatcaaaaaaagacccaatcataaaacttctatatgtcactccagaaaaggtttgtatttatatcattattttaaaatatattaaagaccactagaatacatatatttttaagattttaacaaaattttgtatacgtagtgcaaagaatttttgtacaactttcatccagaaaccccaaatggtaacattttactataattgctttgtattctctctctgcatatattttcctgacacatttgattgaaaattgcagacatggtatccttttaagccctaagtacttcactgtacatttcctaaaaacaacgtattctctcatataacctcagtacaatgatcaaaattaggagatgtacattgatgcagtactattacttaatctgtaaaccttattctggtttcactagttgtcccaataatgtcctttatagcaaaagaaaatcccagatcatgcatgcattccgttgtgcttctctgtaatcttgtaaacagtttctctctcttaatatctttcgtgattttgaagtttttgaaggccagtcgttt

SEQ ID NO: 47 - DNA, 1099 bp, Homo sapiens
acattctaaaatttgatctgctattttctattacttctgctgttctcttcatagattgaaataagaaccaattttatatggaggtgtttttgtttttgtttttgttttttcgagaccgagtttcggtattgttaccaggctggagtgcagtggcacgatcttggctcactgcaacctccacctcccgagttcaagcgattctcctgcctcagccttcctgagtagctgggattacaggcatgcaccaccacgcccggctaattttgtatttttagtaaaggtggggtttcaccatgttggttaggctggtcacaaactcccgacctcggatgatccacccacctcggcttcccaaagtgctgggattacaggcgtgagccaccgcacccggccttatagaggttttaatacagcttaagttgtgatggaatttgaagaccacagaatcatgaggtgatgtgtttcagtgtttttacatgtctaatgtatttctggcctagatctgtgcaagtaacagactcatttctactctggagaatctctatgagaggaagctcttggcacgttttgttattgatgaagcacattgtgtcagtcaggtaaatactgttttttatatccggaaataccgataaatacatactaccaacaatatatgtatttactgaataaaaacccacactgagtgaacgagtctcctattttactgaagaataaggtagttcttaatacattgagcagtgttggctttttatagaaggaagctccaagtagtctgaaaagcagtatttttttttccaactagtggggacatgattttcgtcaagattacaaaagaatgaatatgcttcgccagaagtttccttctgttccggtgatggctcttacggccacagctaatcccagggtacagaaggacatcctgactcagctgaagattctcagacctcaggtgtaagttgttgcacgtcacgtatttgagaaccctggggcagtgactgccagagctgctacatgttagaatcacctgtggcgctttaacgccaccaccccacccccaccccacccccatgcccaagttgtaacccgatggcagcta

SEQ ID NO: 48 - DNA, 1149 bp, Homo sapiens
ctggtcacaaactcccgacctcggatgatccacccacctcggcttcccaaagtgctgggattacaggcgtgagccaccgcacccggccttatagaggttttaatacagcttaagttgtgatggaatttgaagaccacagaatcatgaggtgatgtgtttcagtgtttttacatgtctaatgtatttctggcctagatctgtgcaagtaacagactcatttctactctggagaatctctatgagaggaagctcttggcacgttttgttattgatgaagcacattgtgtcagtcaggtaaatactgttttttatatccggaaataccgataaatacatactaccaacaatatatgtatttactgaataaaaacccacactgagtgaacgagtctcctattttactgaagaataaggtagttcttaatacattgagcagtgttggctttttatagaaggaagctccaagtagtctgaaaagcagtatttttttttccaactagtggggacatgattttcgtcaagattacaaaagaatgaatatgcttcgccagaagtttccttctgttccggtgatggctcttacggccacagctaatcccagggtacagaaggacatcctgactcagctgaagattctcagacctcaggtgtaagttgttgcacgtcacgtatttgagaaccctggggcagtgactgccagagctgctacatgttagaatcacctgtggcgctttaacgccaccaccccacccccaccccacccccatgcccaagttgtaacccgatggcagctaaatcagaacgtttggggctgagagccagtatttttttaaaaatccccaagtgattacaatgtgcagcagagtttgggaaccagagtcctagggcttttcttcacttactgaaattaaaactccttttcagtacctactttagaagtagggataaattgcatgccatatctatcatccctggtatagtcccagtaataaattaatttttacttatctaattttggcttccatatatcctagagtatacttcttgaaatgaaagatgaccctgctttgtcatttccccctaaggtcccagttgaatccaggatgttgaaaatagtccagatactatgtcgaatagcttttttacttt

SEQ ID NO: 49 - DNA, 1107 bp, Homo sapiens
aggttgtagtgagccaagattgtgccactgcactccagcctgggcgacagagtgagactctgtctcaaaaaaaaacaaaacaaaacaaaacaaaaactacttgatattagcttgggctgctatgacagaatactgtagactgggtggcttaaacaacagaaatttatttctcttggttctgaaagccaggaagtccaagatcaagatgctggcagatcccaagtcagatgaagtccctcttcctggtttgcaagtggtagtattctctttgcatactgacatatgcgggtggggagagccagcaaggtctctacttatttttgagcacttatctcattcataactccacccctcatgacctaattatctcccggaggctccaactcctaataccatcacactgggggttaggattttaggggggacacatgtagtctataacaatacctaaagtcatattttctcataataactaaattttatgtttgggacttttttaggtttagcatgagctttaacagacataatctgaaatactatgtattaccgaaaaagcctaaaaaggtggcatttgattgcctagaatggatcagaaagcaccacccatgtgagtacagccatgtgattagctgtctagaagtaacaaatgtctttttagtaccacaataagatatataaaattgcatattaaacattcctttttgcattatgacagcactaacttgctctttatagagcagactattgcaactctctcaattctggaaattataaaatctcatttggtttaataacaataaattctaacaaaaatatattaaatactccctcctacacacgtatattataacttttggtttcaatgtctttcctcaggcttctatcagtgtttgaattatacagctttttgttttagtgccttgtcccaagcctgtctgcctttgcattatgttaactaaaatgagattctgaaattcatagtagttttccatgtaaccccctttccacttttccatggagaatatttttggtatttctattttattttttagaaattagtatacatatttgtgtggacaaatcagtcagtagagatctaccaagaaa

SEQ ID NO: 50 - DNA, 1161 bp, Homo sapiens
ctcctgggttaaagtgattctcctgcctcagcctcctgactagctgggattacaggtgcccaccaccacacctggctgattttttttgtatttttagtgaagatagcttttcaccatgatgtccaggctggtctcgaactcccgacctcaaatgatctgccctccttggcctcccaaagtgctgggattacaggcatgagccaccgcgcccggccaaggatggcttttttatacccacatgtatctagtgtgaagtagagcccagagttcatccaggtccacctcacgagtcattagcagcgacaggattaaaagccacatctcatttccagcacacatgaattccttgcttgaattattcacgtgtgtggtcttccagcagtataagaacactacgggagatctatttatggttcatatatttctgaaaatgtagtgtaaattgtgtttttgtttatgttaaaaattcttgtttctcagtactcttggtttcttggcagatgattcagggataatttactgcctctccaggcgagaatgtgacaccatggctgacacgttacagagagatgggctcgctgctcttgcttaccatgctggcctcagtgattctgccagagatgaagtgcagcagaagtggattaatcaggatggctgtcaggtaacatttttaaagataaacaaataatagaaataatcttttatagcatataaccaaacatgcacatgtagaatgcaaactgtttttaccttgaaggtagtaaacatcaaaataagactgaaatttaaaaaacagattttctttgagacttctaaagttgctttttctttcataaaaaaaatctgcttgagatataattcacatatcataaaatttatcctttcaaagcaaacaagttagtactttttagtttatttgcaaagttgtacaataatcatctctatctaattccagaatttttgatcaccataaaaagaaacctcatacccagtcacttcccccaccccctaatgcctggaaaccacaaatctactaactactgctaacctgtttctagagtttattactctgtacattgcatgtaaatagaatcatacagtatgtggtctttgtgacttttcttttttttttttttttccggagacagagtctcactctgt

SEQ ID NO: 51 - DNA, 1196 bp, Homo sapiens
gatgataagcagtggagcaggtaagaacgtattgttcctgaaccattggaggaactagcagcagtgacctctgaggagccctgggaacaccctggagctcctgagcaacacgttgcttgtgatcactgacctggatatcatgactgtgtgagcaacaccccccacacctcagtagcaaaaacagagaacagtggcagcacatcgtgggctgactgcagttgattctggctctcttacatgagaatgccaagtcatacaagaaagtgcctgccatgctgagcttctctttaccttcttgggttttaatggcattgcaagttatcagtataaaaactcatattagttatactaaatagttggaccaagttaagatattaggttgttatgtagtgtgcattttaaagtaaaacaaatgatagagcttttagaagcatctattatgaaaatgttccttcaagtctgtgccttatgaatctaataagcttttgcttttatatcaggttatctgtgctacaattgcatttggaatggggattgacaaaccggacgtgcgatttgtgattcatgcatctctccctaaatctgtggagggttactaccaagaatctggcagagctggaagagatggggaaatatctcactgcctgcttttctatacctatcatgatgtgaccagactgaaaagacttataatgagtaagctgggctccattgtagagacattctgtcatcttcagcctcatgatagtagtctactcctgctattgtggtacttctggtccagttttccttaaataatcgtagaaaaatagaggagtttatacagattggcaattttattttagttcatttttattataaaagtggtaagtgcttattttgtaaaactcaaatgatacagatgtgtacaaggcagaaaatttacaaaccatgccttgtagttttgcccccaaaataactctagttattggtttcctttgtatcctttcagaccctatttctgcatgcattcttgcatgtaacacatatttcaaacatgcaggaagataaaaaggagaaaataatgagctgtcatatactaccatctggattaagaaataaaacacaatcaatcgagctgaacccctccccaccaccccatagcctctcttgtctcatccgtcctctcccattagaggcaggcaaatatcttgtat

SEQ ID NO: 52 - DNA, 1191 bp, Homo sapiens
aataatttgggtgatgttcaacagatgttaggcattgctgtgtttcccttcatgtaaaatattctgtctctgtgagttcaccacagcacccccgggcttgttggcacacaattttggaaccactggtgtaactactttgacctcagatactcagagaagtgcatggccactgccgtaatctcaggctctgcttcctcaggatgttcagttcggtggatgctcgactgataaatacagcaaatataagtcaaaccatcatcattggggataatgaagatttgaaaaaaaaaaacctaacatttattcctatagtactaaaatcttgaggatgaacattaatactcagttaattataatatagaatgccatgttgacaatgctgttaacagtaattttcttatttaatatttaaagttatatgaatctattctaaatatttctatgatatgctctatttttcccctataagtatgtcttactatagtcttcatctcttttagtggaaaaagatggaaaccatcatacaagagaaactcacttcaataatttgtatagcatggtacattactgtgaaaatataacggaatgcaggagaatacagcttttggcctactttggtgaaaatggatttaatcctgatttttgtaagaaacacccagatgtttcttgtgataattgctgtaaaacaaaggtaaaaaaagaagttttaaaattctttataattaaattttttttctcttactttaaaaatgtagatacaaattagattgcaaaaggtggtctccgacagattaacaggggaaagacagcttccttccagtagtaatttggaatggaaacatttaaaaagtaatttcatgcggtatcttttctttataattagaaccctgttaaaaaatataatggacatcagcatatccagaatattgagtttatatatgtgcactgatgattacagaatattttagaaatattaatatgcaaacatccaaaaagatccaacatgggcaggtagaatattttaaatttaatatattaatgttattaatataatacattatattaaaaatttaattgattaaattaaatatattaaaattgacgtattaatatttaatattttaaatatttaattaatatactaaaaatctcattctcaaaagagtaataactagtgtaccgtatgtttga

SEQ ID NO: 53 - DNA, 1148 bp, Homo sapiens
aaagtcatctagtaacggggactctaaaaagtgggcaaagtttggggatagctgaaggaaatgagaaaggaaactagcaggagatgatgaaaagagcgttgactatggcaccaaagaccccagaggggttagaatccgtggatttacgtggcaccccacaggttcccacccagtatgtaacagagcactattctaggaggcatggaggatttaaattgtgtgtttgtgtgtgtgtctgtgtgttatatatgtgtttctacccacagagtgctatcaggtagttgaaagacaagacgtatctctgtgaaacagtaacaacatcgagtggtagttgttctagaacttagataagaatgaacatttgaaatttccgtaggttttggtctcggtattggtctggaaatgggttatgatgaatctactatagttaatattaaaccctagtaatctaggcattgttaccttaattatagcagaaagtattctctttttattcataggattataaaacaagagatgtgactgacgatgtgaaaagtattgtaagatttgttcaagaacatagttcatcacaaggaatgagaaatataaaacatgtaggtccttctggaagatttactatgaatatgctggtcgacattttcttgggtaagtcatctgttttgaatgtttgagttacttcaattgaaattgaacatctaaagaatttattacaagtacatagaaaaactttttgtctattttcttataaaacttgagtttctgaataaaacttttaagtaacaaaagaaagtcaattattatactgttttatataatgtatatgtcactaagttgagatggtttcacatacaaagaagaaaataataaagcttatgcgagttcatctgagtgggtggaatgtaactattaaaatgtcagtaaggaaataaaatgaggattagacccataacagcatagagaataggagagagactattatcagattagtgccttaaaaatctctcaggggctgagcacagtggctcacacctgtaatcccagcactttgggaggccgaggcgggcggatcacctgagatcaggagtttgagatcagcctggccaacatggtgaaaccctgtctctactaaaaatacaaaaaattag

SEQ ID NO: 54 - DNA, 1200 bp, Homo sapiens
ggtgtgatggcctgcacctgttatctcagctagtcaggaggctgaggcaggaggatcacttgagcccaggagtttgaggctgcagtgaaccatgattgcaccactgcactccaacctccacaatagagtgagaccctgtctctaaaaaaaaaaaaaaaaatgtagataagtaatgcacagttatcctaatacatagcacagtgataggaagctattatggtttatgtaaactctttctttgatttatttgctccaatataattttgctgctgttttttgtccatgtgtattgtaaaaagataaggaaaagtacatacaaccatagaaattttagcgttctactcaaatactctcatttaacagaaatgagtgtctgtgccggggtttgtgatctattccatctgtccaaacctgtccataaatgactttttagcctcttctatttgagggtgatgatatacgtacatttactcatcttacttcctgtatcttcttatcagggagtaagagtgcaaaaatccagtcaggtatatttggaaaaggatctgcttattcacgacacaatgccgaaagactttttaaaaagctgatacttgacaagattttggatgaagacttatatatcaatgccaatgaccaggcgatcgcttatgtgatgctcggaaataaagcccaaactgtactaaatggcaatttaaaggtatagtatttttcatgtttattttattatctcacaatgagtgaaccaaaatatattattgtgaagtatagtgtctttgtccaagcttatagatactgaatttatatatactgttctatacgaacatattctgtttttcttaaattggaaagagatcttaaaattcaacccaagtaatatgacacctgtcaaaagtaatttaatgggttatcaggtcactaaatctttatatattcattaaagaagcatttatcaagaggctattctatgcttgacactggagatacaaagatggagaatgcacagcccctgttcccagtgggctcactatctgcatgacagaatagaattgccccccaaaaatgcaattaagcattaaataaagcccctgtatgggtacaagtgcacatatacccactcctatgatttgtttctctctcataaaggtagactttatggaaacagaaaattccagcagtgtgaaaaaacaaaaagcgtta

SEQ ID NO: 55 - DNA, 1193 bp, Homo sapiens
gcttatgtgatgctcggaaataaagcccaaactgtactaaatggcaatttaaaggtatagtatttttcatgtttattttattatctcacaatgagtgaaccaaaatatattattgtgaagtatagtgtctttgtccaagcttatagatactgaatttatatatactgttctatacgaacatattctgtttttcttaaattggaaagagatcttaaaattcaacccaagtaatatgacacctgtcaaaagtaatttaatgggttatcaggtcactaaatctttatatattcattaaagaagcatttatcaagaggctattctatgcttgacactggagatacaaagatggagaatgcacagcccctgttcccagtgggctcactatctgcatgacagaatagaattgccccccaaaaatgcaattaagcattaaataaagcccctgtatgggtacaagtgcacatatacccactcctatgatttgtttctctctcataaaggtagactttatggaaacagaaaattccagcagtgtgaaaaaacaaaaagcgttagtagcaaaagtgtctcagagggaagagatggttaaaaaatgtcttggagaacttacagaagtctgcaaatctctggggaaagtttttggtgtccattacttcaatatttttaataccgtcactctcaagaagcttgcaggtgggtacacatgtatcctttgttacgtggcacagattaataggccgaaagttaatcttgctagggaactccttaagtgataaatatatctcagtggtttgtttctttttggggtttgttttgagacggggtctcgctgtgtcacccgggctggagtgctgtggcatgatcatgactcactgcagcctcaacctcctgggctcaagtgatcttcccacctcaatttcccaagtagctgggactacaggtacacaccagcatgcccagctaatttttgtattttttcgtagagacagagtttcaccatgttgcccagtctggtctcgaactcttggcttcaagcaatcctcctgccttagcctgccagagtgctgggattacagataagcatgagccactgagcctggcctcagttgttttaattatttttatttaatctctggattaaaatctcagagaaacaattgaaacttattctttttttgtttgtttttgagacg

SEQ ID NO: 56 - DNA, 1123 bp, Homo sapiens
cacatggggaaagagtggaggaagaaaagtttgtgctggaggaagtaacaatttggttatgccgtctagggtggggtgtacaagtctggagtgcagagaagaggctggagctggaaatagaaatgcagcgttctcagtaaagagagggcacaccagtctcagctagatgagtactggccatgggaacagtgggcaagagcagatctgctccactccacgcacatggcacaggtcccaccctcagcttcctcctgccctggctcttgcccttgctctgccctggcctatgccgctggaattggatggtgggttcctgccctctgtgcctgtctgctgcctctgaggtgctaactttgccttttacaaaattggcctgtgttcccagtaccctgcagttagttggcacttagcagacgtgtgctgaatgcgtgaatgagcctgaattcagtgggttttctatgggtgataatttaaattcctaattttatgcctttgcacagaatctttatcttctgatcctgaggttttgcttcaaattgatggtgttactgaagacaaactggaaaaatatggtgcggaagtgatttcagtattacagaaatactctgaatggacatcgccaggttagtacacagccatgtgtgttctctaaaagcctgtttaatgtgaagcgacgcgtctcactgaattagaaggatgcagttgtgtgaatgcttcctacacctcgtcacactgacatccaagtcagcccccagtggtgtgccagtcacctctgagaggacactagtgcttatgccccctgtgagtgccagttctgaacttactcataggatccaaaaggggacctttgggcccaggggttgctggttcccgtaatgcaagtgctcaagggatcagagccctgggtaccagttccagatctgccaccacgtcatgctgtgtggtctctagcaggccaccaatagcctctttgtgaatcaggttcctccaccaaggaaggaacatgttatctgacaaacatgtctaaagataaaatttaagactagtgtttaaatgttttggagaaatgagcatgcagctagaatgttattattgttagtcattgatagaacctgcctgagtg

SEQ ID NO: 57 - DNA, 1202 bp, Homo sapiens
agtaaaataggatctagaattttcttatgttcatttactaagaaactattgttcaaagatgagatacaggaccgtttgtttcccttatattgagctgattttttcagcacatttaaaataagtaaaattgcctgccatctttatagcagttgatactttttgaattgcctaccagaactaactgcccaatcaacaacaggaacacaggccatatgcgacagtatgagctaaacctcatgtctctagttaacttcaagactatcacaaatttttttaatgaattctgattctcttttgttaaaaatgaattgccattgaacactttggggctttgtgcagtaaaaaaaggtttggttcttgctgaattgttgaatccatatggcagggaagcagctaggtatctgctaaaatgggcccctgcagcgtgtctcttcatatacactaaaaacacgtggaccagtgcgacatcacctgtaaacatctgcattttccatttgtagctgaagacagttccccagggataagcctgtccagcagcagaggccccggaagaagtgccgctgaggagctcgacgaggaaatacccgtatcttcccactactttgcaagtaaaaccagaaatgaaaggaagaggaaaaagatgccagcctcccaaaggtctaagaggagaaaaactgcttccagtggttccaaggcaaaggggtatgttttgtgacatctttttcaatatagggaacaagggaagaaaggacaaaagtgcaacagctctgccttgctttgaaggatttattaaaataagccattattaaatattgctaatggaatgacagttgttaatggagtgacaattaaggtttgatccaaaacaaaaatatttgcttcaagaaacaacaaaaaatatttgcttcagatgtttaaaacatctactgactaatagttatgactaaagttttctttctttttttaatttgaggacaaagtctgactctgttgcccaggctagagtgcagtggcacaatctcggctcactgcaacctctgcctcctgtactcaagtgatcctcccacctcagcctcctgagtagctgggactccaggtgtataccatcactcctggctaatttttgtattttttgtacagatggagtttccccatgttgcccaggctggtctcaaactcctgagctcaagtgatcagcccac

SEQ ID NO: 58 - DNA, 1355 bp, Homo sapiens
ttgccactcctggccacccagctccaccccatgcatgctcaccccacagctgccttgctctggactgtgcaagtccagtcattccggggtgcctgtcagcagggagctggggccttacagcaaggtgtttcacttcttttatttggtcagaatagatgaggacatgtggacctcagctcctcttgcaggctctggttgtaggctgccgaaggtgtgggtggagagaggggcggtgggttggtcacaagtcagaaaattaagaaacagtcctgcacatttcagaaagacaaatccagaacaaatttatatgaagggccgcggtcctttattccataagtagtaaaggaaacttaccttacctagggggctcgtaggcagaaaatgcacaaggacacattaggcccagggaagtggtattgtagctctgtgcaggttgagaggaaggtcattcatttttggtttcatttaacattttgatttttttctttgtcacatttcagggggtctgccacatgtagaaagatatcttccaaaacgaaatcctccagcatcattggatccagttcagcctcacatacttctcaagcgacatcaggagccaatagcaaattggggattatggctccaccgaagcctataaatagaccgtttcttaagccttcatatgcattctcataacaaccgaatctcaatgtacatagaccctctttcttgtttgtcagcatctgaccatctgtgactataaagctgttattcttgttataccatttgaagtttttactcgtctctattaatatttaaataaatgctggggggtgatagttcttctttttaaaataaacattttcttttgaataagcatgttttgctgccgctgcaagtgttgtggccgttgtttctcagaacgtctgaggcagcagctgaatcatctcagtgcaagagcttctgagcataacacgaaacccagaagccaaaggaagagccacgcgtgggcccttgtgaaactaaagcttttcgtgtaagacaacacaaacaaaatttaaagacaaatgacggggaaaagaggagaaaatatattacaaaggattagtatccatcataccaaatacccgtgaaccagtcagaaacatcccagggggcaggtggaccaaggatgtgaacaggctagtctcagaagaagaaatacacatgctcatggcccggcactgtggctcacgcctgggatcccagcactttgggaggccgaggcaggtggatcacgaggtcaggagtttgagaccagcctgcccaacatggtgaaaccccgtctctactaaaaatacaaaaattagccaggcgtggtgtacaggcacgcc

SEQ ID NO: 59 - DNA, 1500 bp, Homo sapiens
ttacctagggggctcgtaggcagaaaatgcacaaggacacattaggcccagggaagtggtattgtagctctgtgcaggttgagaggaaggtcattcatttttggtttcatttaacattttgatttttttctttgtcacatttcagggggtctgccacatgtagaaagatatcttccaaaacgaaatcctccagcatcattggatccagttcagcctcacatacttctcaagcgacatcaggagccaatagcaaattggggattatggctccaccgaagcctataaatagaccgtttcttaagccttcatatgcattctcataacaaccgaatctcaatgtacatagaccctctttcttgtttgtcagcatctgaccatctgtgactataaagctgttattcttgttataccatttgaagtttttactcgtctctattaatatttaaataaatgctggggggtgatagttcttctttttaaaataaacattttcttttgaataagcatgttttgctgccgctgcaagtgttgtggccgttgtttctcagaacgtctgaggcagcagctgaatcatctcagtgcaagagcttctgagcataacacgaaacccagaagccaaaggaagagccacgcgtgggcccttgtgaaactaaagcttttcgtgtaagacaacacaaacaaaatttaaagacaaatgacggggaaaagaggagaaaatatattacaaaggattagtatccatcataccaaatacccgtgaaccagtcagaaacatcccagggggcaggtggaccaaggatgtgaacaggctagtctcagaagaagaaatacacatgctcatggcccggcactgtggctcacgcctgggatcccagcactttgggaggccgaggcaggtggatcacgaggtcaggagtttgagaccagcctgcccaacatggtgaaaccccgtctctactaaaaatacaaaaattagccaggcgtggtgtacaggcacgcctgtagtcccagctactcaggaggctgaggcaagagaatcgcttgaacccaggaggcggaggttgcagtgagccgagatcgtgccactgcactccagcctgggtgacagagcaagactccgtctcaaaaaaaaaaaaaaaaaaagaaatatacatgctctgcaaatatgtgaaaaaggtcaatctccatgaataaaaatatgataaaaccatgtgagaccattcttttgcctacaaattatcaacactggataatatcccagtatttggggtcagcgagaaagattggcagattgtttgggtggacgtgtgtggcagttgctgtagtcctttggtattgtggtggcctcgtttttcaggatgctccataatgggccaattggccccagcatctttggtaggattttggcctctcttgcctgaactccagtggccccattttcggagacatgcgtttctcagctgtaggtcacctttgtctgggtgccacacagcgaggaag

SEQ ID NO: 60 - DNA, 3616 bp, Homo sapiens
gcggccgctgcagagattggaatccgcctgccgggcttggcgaaggagaagggaggaggcaggagcgaggagggaggagggccaagggcgggcaggaaggcttaggctcggcgcgtccgtccgcgcgcggcgaagatcgcacggcccgatcgaggggcgaccgggtcggggccgctgcacgccaagggcgaaggccgattcgggccccacttcgccccggcggctcgccgcgcccacccgctccgcgccgagggctggaggatgcgttccctggggtccggacttatgaaaatatgcatcagtttaatactgtcttggaattcatgagatggaagcataggtcaaagctgtttggagaaaatcagaagtacagttttatctagccacatcttggaggagtcgtaagaaagcagtgggagttgaagtcattgtcaagtgcttgcgatcttttacaagaaaatctcactgaatgatagtcatttaaattggtgaagtagcaagaccaattattaaaggtgacagtacacaggaaacattacaattgaacaatgcctcagctatacatttacatcagattattgggagcctatttgttcatcatttctcgtgttcaaggacagaatctggatagtatgcttcatggcactgggatgaaatcagactccgaccagaaaaagtcagaaaatggagtaaccttagcaccagaggataccttgccttttttaaagtgctattgctcagggcactgtccagatgatgctattaataacacatgcataactaatggacattgctttgccatcatagaagaagatgaccagggagaaaccacattagcttcagggtgtatgaaatatgaaggatctgattttcagtgcaaagattctccaaaagcccagctacgccggacaatagaatgttgtcggaccaatttatgtaaccagtatttgcaacccacactgccccctgttgtcataggtccgttttttgatggcagcattcgatggctggttttgctcatttctatggctgtctgcataattgctatgatcatcttctccagctgcttttgttacaaacattattgcaagagcatctcaagcagacgtcgttacaatcgtgatttggaacaggatgaagcatttattccagttggagaatcactaaaagaccttattgaccagtcacaaagttctggtagtgggtctggactacctttattggttcagcgaactattgccaaacagattcagatggtccggcaagttggtaaaggccgatatggagaagtatggatgggcaaatggcgtggcgaaaaagtggcggtgaaagtattctttaccactgaagaagccagctggtttcgagaaacagaaatctaccaaactgtgctaatgcgccatgaaaacatacttggtttcatagcggcagacattaaaggtacaggttcctggactcagctctatttgattactgattaccatgaaaatggatctctctatgacttcctgaaatgtgctacactggacaccagagccctgcttaaattggcttattcagctgcctgtggtctgtgccacctgcacacagaaatttatggcacccaaggaaagcccgcaattgctcatcgagacctaaagagcaaaaacatcctcatcaagaaaaatgggagttgctgcattgctgacctgggccttgctgttaaattcaacagtgacacaaatgaagttgatgtgcccttgaataccagggtgggcaccaaacgctacatggctcccgaagtgctggacgaaagcctgaacaaaaaccacttccagccctacatcatggctgacatctacagcttcggcctaatcatttgggagatggctcgtcgttgtatcacaggagggatcgtggaagaataccaattgccatattacaacatggtaccgagtgatccgtcatacgaagatatgcgtgaggttgtgtgtgtcaaacgtttgcggccaattgtgtctaatcggtggaacagtgatgaatgtctacgagcagttttgaagctaatgtcagaatgctgggcccacaatccagcctccagactcacagcattgagaattaagaagacgcttgccaagatggttgaatcccaagatgtaaaaatctgatggttaaaccatcggaggagaaactctagactgcaagaactgtttttacccatggcatgggtggaattagagtggaataaggatgttaacttggttctcagactctttcttcactacgtgttcacaggctgctaatattaaacctttcagtactcttattaggatacaagctgggaacttctaaacacttcattctttatatatggacagctttattttaaatgtggtttttgatgcctttttttaagtgggtttttatgaactgcatcaagacttcaatcctgattagtgtctccagtcaagctctgggtactgaattgcctgttcataaaacggtgctttctgtgaaagccttaagaagataaatgagcgcagcagagatggagaaatagactttgccttttacctgagacattcagttcgtttgtattctacctttgtaaaacagcctatagatgatgatgtgtttgggatactgcttattttatgatagtttgtcctgtgtccttagtgatgtgtgtgtgtctccatgcacatgcacgccgggattcctctgctgccatttgaattagaagaaaataatttatatgcatgcacaggaagatattggtggccggtggttttgtgctttaaaaatgcaatatctgaccaagattcgccaatctcatacaagccatttactttgcaagtgagatagcttccccaccagctttattttttaacatgaaagctgatgccaaggccaaaagaagtttaaagcatctgtaaatttggactgttttccttcaaccaccattttttttgtggttattatttttgtcacggaaagcatcctctccaaagttggagcttctattgccatgaaccatgcttacaaagaaagcacttcttattgaagtgaattcctgcatttgatagcaatgtaagtgcctataaccatgttctatattctttattctcagtaacttttaaaagggaagttatttatattttgtgtataatgtgctttatttgcaaatcacccactcctttacaaccatactttatatatgtacatacattcatactgtagaaaccagctcatgtgtacctcatatcccatccttaagagaagaaatgttataaagtagaactaaatataaattttcagaattaatgcattcaaagtaatatatcaaatccaggactttgttaacttcaggtaaaaacttcattagggtaatatcatctcaattttttcaaatgaaaggattctctaattagaaatttatatgtcagagctgttataaatttatcaactgtcaaatatgttctggacagctaaatcatttgagatttttggttttttgatttctattccctaacttgtgaagacaatgaaaaatcaggcagaaatatttagtatctagtcagtatctgtagctacactgtataactgttcttcaataaaatggttcatattttataga

SEQ ID NO: 61 - DNA, 1500 bp, Homo sapiens
tggtgacaattatttgcattttccaaatggacggaatgagcctccggagggtacacgaggtcaccagcgtgagcccgcggtggagctggaggcgtatttatagctggctgacctcagtcctgttgggccctcgccgctccttatcttatgccgctggaattcgcgggctcgcaggtcacaggagcccgggcgcgccgggcctggcgctcccgaatcgatgagggaagccgctctccccggcagatcctcccggccggggagcctccatcaccctgcctgcgcctcggcacgctggcaaggagcccgggaagagacgccgggagcggtgggtgggcgagaaacaaatgcaatgtgacttatatttttctttgtcgcaactaccacgacctggccatcccccaccttggtgacttggtgccttcccagcgaccttatttcacgccagctgactggcgttcaccgcagtgtgagtgtcggccggaggaggggtccacgcgaaagagcccgcgagagtggggatatccggccccgaaggccggagcgggcgtccagggcgccgatggccgcagcgcccggcagccgtgtccacgctcccctccgccgcgttccatcgcgtgctacctacggcgtctgcgggaagctacccgggcggcagctgtggggctggcttgtggggaggggccggcgggcccgcgcggaggagcagccccgactcccgcccgcaccagcagctcggcgcccccttgccggcggctggccctcctccccggcaactgggcgccgggctccgcgaactcttcgggcgcttccgccgtgcgctcggctcttttcgtgtccggggcggggcggggcaggcgcccgtggtcgggtgcgcgcggcgcgggcgggggccttcccagtgcgcgcgcgccgtgcaaggcccgcggacgcccgcccctcccccaggcccccgcacccgcgccgccccctcccctcctggcaagagtcggcggcggtggcggcggccgctgcagagattggaatccgcctgccgggcttggcgaaggagaagggaggaggcaggagcgaggagggaggagggccaagggcgggcaggaaggcttaggctcggcgcgtccgtccgcgcgcggcgaagatcgcacggcccgatcgaggggcgaccgggtcggggccgctgcacgccaagggcgaaggccgattcgggccccacttcgccccggcggctcgccgcgcccacccgctccgcgccgagggctggaggatgcgttccctggggtccgggtgagttgggagtgcgcgtgcggaccggaggggctggccgcagcggggaggccagaggggctcgggcgaggctgcagaggcagctgggcgcgcggtggccggagccaggggctgcccggcccggccccggcagctccgcaggcctcggcgcgcgctgggccgggaccgcccagccagagacccacggcaccccgcgccgcgtcccccgccggcccctct

SEQ ID NO: 62 - DNA, 1281 bp, Homo sapiens
gagcccgcgagagtggggatatccggccccgaaggccggagcgggcgtccagggcgccgatggccgcagcgcccggcagccgtgtccacgctcccctccgccgcgttccatcgcgtgctacctacggcgtctgcgggaagctacccgggcggcagctgtggggctggcttgtggggaggggccggcgggcccgcgcggaggagcagccccgactcccgcccgcaccagcagctcggcgcccccttgccggcggctggccctcctccccggcaactgggcgccgggctccgcgaactcttcgggcgcttccgccgtgcgctcggctcttttcgtgtccggggcggggcggggcaggcgcccgtggtcgggtgcgcgcggcgcgggcgggggccttcccagtgcgcgcgcgccgtgcaaggcccgcggacgcccgcccctcccccaggcccccgcacccgcgccgccccctcccctcctggcaagagtcggcggcggtggcggcggccgctgcagagattggaatccgcctgccgggcttggcgaaggagaagggaggaggcaggagcgaggagggaggagggccaagggcgggcaggaaggcttaggctcggcgcgtccgtccgcgcgcggcgaagatcgcacggcccgatcgaggggcgaccgggtcggggccgctgcacgccaagggcgaaggccgattcgggccccacttcgccccggcggctcgccgcgcccacccgctccgcgccgagggctggaggatgcgttccctggggtccgggtgagttgggagtgcgcgtgcggaccggaggggctggccgcagcggggaggccagaggggctcgggcgaggctgcagaggcagctgggcgcgcggtggccggagccaggggctgcccggcccggccccggcagctccgcaggcctcggcgcgcgctgggccgggaccgcccagccagagacccacggcaccccgcgccgcgtcccccgccggcccctcttttgtctcccactcgcgggttgcaggccgagtttggggatgcggagtgggcgaaagtcgctccggggacgcttctggaatccttaaatgggaaaggcgctcacctccccgccccggagcggcgaggctgatatttgtgatttggctccggacgctgtggggaggaacaggggagaacaaaatgagtttcgggcgggggtcgagtgagaggagcagccggcccgcccccgagtccccgcgggaaggggccctggcccccgagctcccggagctgcttcacct

SEQ ID NO: 63 - DNA, 1115 bp, Homo sapiens
accagtgcaattaattcttcaacctcacaagtcctaatgttctaggtagaagtgtggctgaaattaaaactggttattagactttgtaatacaaaagtagaaaaaagtgatattagctaggtggtccaatatatttttgtctaagtaggaatctgaatattgtagaattgtacatttcggtgctgcttctagctattcctgttcttttttttttttcaaattgagatgagttttttttttttccatcaaagcttaagataacataggaattttatatggaagtactgttcccacagaactaactttacaaatgtaaagcttgggcagaggttgaggaaaatggtaaagtgatagatttcgtaaaaactgtagaaattttcattgactttactttgaaaatgtatagttgtacatgcgaaacgcttctagtattgcttctagatgtattattctgacaaagttccctaagtcttaaataagttctttttttttctaaacagacttatgaaaatatgcatcagtttaatactgtcttggaattcatgagatggaagcataggtcaaagctgtttggagaaaatcagaagtacagttttatctagccacatcttggaggtaaggaaaagaacataatttagaataatatgaaatttctcattttttaatagttgaaaataatccttctacactgcaactttatttgagccttcttcagtttctttgtaacaccacaactttatagtagcttctttagtttccttaatcatcttcctgacgagttcataagtaattctaatatatattcctcataaatgttgaacctcttcaggagtgaaaggtatttatttcttactaatcactttcataaatctccttttagaagataagcattaaatggtttatatgtttatttcttccccctaagtttgcaaagcagagttcagcatgcaagattaggccaggtgtgcctgtaatcccagcactttgggaggctgaggcaggtgggtcacatgaggccaggagttcgagaccagcctggccaacatggcgaaatctcgtctctactaaaaatgcagaaattagctgagcatgatggcctaagcctgtgatcccag

SEQ ID NO: 64 - DNA, 1219 bp, Homo sapiens
tgtctcaaataaaataaaataaaatgaattaatatgtgtaattttctaggtcggcttcctcttctatctatagaataaattatttattagaaagacttagggtgttttcattatatctactagaatttgcaagaatgttgatggttacccttatgttttaaatttaacttttcctgtttaagtcttaatatagttgggaattttcatgttattaataaaataattagaacagccagaaaggactattgagattgtttaatatacttcccttgttgtacatatggctaatctgaggtcaggagaggttgcagcctattaactaaattatttgaagtttgaaattatagtgcctaaaaaaaaaaaagcaaggatacctttaatcttttaaaatgtatttcattgtttaaaggtgtgtttgggcatttgtttcccttttagtttttgaaaaatttccaaaattcagttgtattccttaccttttaaatatttttgtctttcaggagtcgtaagaaagcagtgggagttgaagtcattgtcaagtgcttgcgatcttttacaagaaaatctcactgaatgatagtcatttaaattggtgaagtagcaagaccaattattaaaggtgacagtacacaggaaacattacaattgaacaatgcctcagctatacatttacatcagattattgggagcctatttgttcatcatttctcgtgttcaaggtaaatcagtgttcattttagtaatgtatgtgtgtatataaaaagcactatttcttgcttctgttctttcaactcatccctgtttgaatagttaggcccagcctactagggcagcttttaggaaagaagcaaagatgaaacacgtgccaaataattttttaacttggctgtgatggaaacattttcaagtatttttgaaatctcagtctgagtctgtcttctccttcacaacataggcgtaatgatacacagcattaggtcttgtgaggattaaatgagataaagtatgtaaagccacctcagttagtagctgaaagacagggtaataggtagtccaggctgagcttcaaaattcctctctcctttaaaatacaataaggagcaagtgtaaataataattgaaaaatcattttattggccaggcacagtggctcacacctgtaatcccagcgctttgggaggccgaggtgggcggatcatgaggtcaggagttcaagacc

SEQ ID NO: 65 - DNA, 1163 bp, Homo sapiens
tgactatatacttttacctggcaggggagagaccacggtcacgaaggtggttttcccagggcgaggcttattcattgcactccagatgtgctgacccctgcgatttccccaaatgtgggaaactcaactgcataattgtggtggtgggggactgcgttcatgcttttccctggttaaattaaaaaatttttaagttattttaaaaatataaaaaacaagatttgactgtattctgccttgcgccactcttgtttgtctttcactagtgcaaaaattgtgatatagctgtcttcatgtaccccgcaatacctggtgcagtaattctgtgcataataatgtatgtctgtttgttgtatgaatgaaatttatatttctaaagaaacatgctagctacaattattgtgataagaaagcttaacaactttttctcattgaaaattgtcacgaaacaatgagcttttcagaaatgatttacttacaaattccatatttgaatgcaggacagaatctggatagtatgcttcatggcactgggatgaaatcagactccgaccagaaaaagtcagaaaatggagtaaccttagcaccagaggataccttgccttttttaaagtgctattgctcagggcactgtccagatgatgctattaataacacatgcatgtaagtattttatgcagcccttcttaagagttaggagaatagagttgcatttagtgctattttaagaattattaaacttgtctgcggtttttttttcattcatatatagtatctttccagaaagccaaaaagccttttgttttgtatattagaacattattccattaaatgattgataggtgagttactatattagaattatgttataatgcagcttttaaaataagatcaaagggatctagtatttaacatctgagtttttaatgatcttttaatcttaaatttattgatgctcattttagaaaacttagaggttaccaaaaaagaaatcagaaaactcactgacaacctcctacttctttttaatttaaaaaaaaattttttttttaactatagacaggatcttgctatgttgcccaggctggtctcaaactcctgggctcaagcagtccttccacctcagcctcccaaagtgctgggattactagggtgagctgcca

SEQ ID NO: 66 - DNA, 1103 bp, Homo sapiens
cccatcatattcagtaaaaggtgccttttagtccccttttttttggtcattaagcctatttgtatgtttcagagaaaagtttgtttttatctattatcatatacaatatggaagtactgaaaaaatgggtaaaaagagacaaagttattttaaagtatgttttcaaaacatgacataaaattttataaatcagctttctgtgatcacatgactgattagcaaagagaagtcacataactcctatgtggaggacttgtttaattgaaatccttttcttcttgacaaagggttgtcactggccttttagatcttggctcagacataactttcatttgtcttaaaacctctggcgttgccaataaatcacgtgtgaatgcaattctaagtcacaaaacaaagtattaaaggccatctgtacctgttcacattcagactcaaatttcgttagtactttctatgtgaatttatgttttgttttgttttgtttttttctgttttagaactaatggacattgctttgccatcatagaagaagatgaccagggagaaaccacattagcttcagggtgtatgaaatatgaaggatctgattttcagtgcaaagtaagatataatttgggacccatgagacaaagaagggaggggccatatgaaagcatcgatttcccccaggagaaacatgcctggtgtacacatcgctgtatgttcacatcagtaaatatattggaggaatacctactgtctagattctgtcctgtattcatatgtagaatttataactaaatcatttctgaaaagctaattgtttgattacaatttccttttttatttccatagacagcacctggctctgttgcccaggctggagtgcagtgctgcgatctccgctcactgcaacctcaagccagcctcctgcctcagccttctgaatagctgagactacaggtgcatgccactatacctggctaatttttgtattttttgtagagacaaggttttaccatgttgcccaggctggtctcaaactcctgggctcaagcagtctgcccgcatcggcccgcaaagtgctgggattacaggtgtgagccactgtgcccagcctg

SEQ ID NO: 67 - DNA, 1097 bp, Homo sapiens
agaatgctttctgtagtttgtccttccctcaccatggatgctcaacttgcctctgcatcaggctcatgacttccgacgtggctggggtaggcagggtctgcagcgcctctgcacgctcagctgccttgctaaccagccttttctttggactacgacaccctccactttttagtctgatcttaaatctcatccacatctcagtaccacagtgagattatatgtaccagaccagtttatgattgtaattacctaagttcgggtttggtgttctaatctagtgtctaacacaccatccacatagatatgttcttaagaaaagccattttgcagtcttcactatttcagcacaaattttaatctttcaataatctgtttttacatataaaatttgcaggcccctttcactcactgaaatagaaattgtattttatgaatactaaaaagacatatcagtttaaaataccaaaccatttctaattttatcattactcttcttttaggattctccaaaagcccagctacgccggacaatagaatgttgtcggaccaatttatgtaaccagtatttgcaacccacactgccccctgttgtcataggtaggttagccgagaaaagtcggagcatgcttctcaaatatcttctctggttttacagtaaccaggctacctagaattgaacacgtcagattattttttcatttcaattgtttacattgtttacttttattgtcaggtccgttttttgatggcagcattcgatggctggttttgctcatttctatggctgtctgcataattgctatgatcatcttctccagctgcttttgttacaagtaagaagatatttattttgaagcaaaatattttgtcaaatattagatgtcaaccgctgtttgtaaagccagttgcagaaaccattaacttgtattctctggttgtatatctcctttatgtaactagactatagttctcttaagggaaaaggaccttactaccaattaattaattgggcacaatttcatacttcttgtatgttcatgattacttatgattttcttattaatggaatagtgagctttctggcatctgaatgtttt

SEQ ID NO: 68 - DNA, 1100 bp, Homo sapiens
ttatgattgtaattacctaagttcgggtttggtgttctaatctagtgtctaacacaccatccacatagatatgttcttaagaaaagccattttgcagtcttcactatttcagcacaaattttaatctttcaataatctgtttttacatataaaatttgcaggcccctttcactcactgaaatagaaattgtattttatgaatactaaaaagacatatcagtttaaaataccaaaccatttctaattttatcattactcttcttttaggattctccaaaagcccagctacgccggacaatagaatgttgtcggaccaatttatgtaaccagtatttgcaacccacactgccccctgttgtcataggtaggttagccgagaaaagtcggagcatgcttctcaaatatcttctctggttttacagtaaccaggctacctagaattgaacacgtcagattattttttcatttcaattgtttacattgtttacttttattgtcaggtccgttttttgatggcagcattcgatggctggttttgctcatttctatggctgtctgcataattgctatgatcatcttctccagctgcttttgttacaagtaagaagatatttattttgaagcaaaatattttgtcaaatattagatgtcaaccgctgtttgtaaagccagttgcagaaaccattaacttgtattctctggttgtatatctcctttatgtaactagactatagttctcttaagggaaaaggaccttactaccaattaattaattgggcacaatttcatacttcttgtatgttcatgattacttatgattttcttattaatggaatagtgagctttctggcatctgaatgttttcgatctgtcccaagaaacccactgtgttataattcttttttttttttttgcgttataattctttagaaatttggagctccagaattgtttgcatgtagccatgatttcagaagacagttgccaaaaaagaagagtaataagagacagtccctaatggatataaactttaataataaaacatcataccaacctagatacattaatgaaacaagttagtaaacccataaataaacaaa

SEQ ID NO: 69 - DNA, 1145 bp, Homo sapiens
attctatctcaaaaaataagtatttgttaaaaatatgagtaggcagttcacagaaaaaaaaaagctgaactgtggaaaaaaattcaattttgctagtaaccagaggaaagcatattaaaagaaggcattgtttcatatctatcaagttggcaaaagtctgaaaatatgacttcgaggtttgggttggaatgtaaggaaatgtatattgtgattatttgaagtcgtatttttttatagctaggatgacacttcacatctgattttgatagtgtctttttacatgccaatacactatagacatctttctgttttaacatgatacatagaactctgaactccatttctagatgtatttaacaggatatattatccaatgataagactaatttggataggattctttctgagggaaggataatggtatagagaacctcaaggtttttcttagggttttatagtttttcatttttaatgtagattgttttctgcttttttaaaagacattattgcaagagcatctcaagcagacgtcgttacaatcgtgatttggaacaggatgaagcatttattccagttggagaatcactaaaagaccttattgaccagtcacaaagttctggtagtgggtctggactacctttattggtaagttaaacgttcctatagacatgaatggtgtgttgatttagaatgtgtcctcatgatggtggacagtataattattgcagatcagggaacaataatggacacatttttttctccttatttagaaagaggtatgcagtattgcaaggtgaaattagttaaaaataagaaatatgaaccaagaaaaatagaatagtcaagtaagatagagctataaaccaggttataggaaccaagtcctacagagaaaggcaggggaagttagatcacgaagtcctatatgaaaggcaagagttagctcacaagttttgctctaagcattttaccagccaacttaaagaggaatcaggtataagattccttgcatctgtaagtttaaactgattgattgagggaactgtaactatttcagattctgaaataaaaaagaagtttcaacagatattcttagagaggatgcttctctcaatatactactaccaaaacacatagttcaataa

SEQ ID NO: 70 - DNA, 1193 bp, Homo sapiens
gccagccacttgaataacctgtttatgatttcagaatacattgtacattgtttcatactttaaagtacattatggccgggcatggtggctcacgcctgtaatcccagcattatgggaggccgggggtggggtggatcacctgaggtcaggagttcaagaccagcctggtcaacgtggctaaaccccatctctactaaaaatacaaaaaaattagctgggcatggtggcgggtgtctgtaatcccagctacttgggaggctgaggcaggagaatcacttgaatctaaaaggtgaaggttgcagtgagccgagatcgcgccactgcactccatcctgggtgacagagcgagactccatctcaaaaaaaaaaaagtacattataagtttttaactggagttggttgggtacaccatgctttttgatgagatggactacccctttgccagtcttaatgggtttctttcatcaagagctcaaaccttttacttttttctataaaggttcagcgaactattgccaaacagattcagatggtccggcaagttggtaaaggccgatatggagaagtatggatgggcaaatggcgtggcgaaaaagtggcggtgaaagtattctttaccactgaagaagccagctggtttcgagaaacagaaatctaccaaactgtgctaatgcgccatgaaaacatacttggtgggtacacactgattcagtcaatttcatttttgacaaggctagtgaggtacaggtggaagcctccatatgtgctttgaaaatgtgtgagttcaactatatacatttggctaaaggaaacctagtagaatacacggtttgaataaaacatagtccggaatgccaaccaagatctttctttactaaccagctgaagaaacagcagtgagtttcaaatggaaaataatactagtttattggacttactcccatagtaatgaaaacccagtcttttatagataacttaagcagtgatttagggtaacattaacatatgtgccttttccctttcataagctcaacagcccaacatgcagtttcattgtacgttctgtgtttaatgtgtgtttccccccatctccacatttacacaatagcaaagtaatttaggtgtgagctggtcagtcaggtacataagccgatctggctatcctgagttttcttttcccttcacctcttgt

SEQ ID NO: 71 - DNA, 1298 bp, Homo sapiens
ggagtgcagtggcgccatcttggctcactgcaacctctgccgccaggttcaagtgattctcttgcctcagcctccagagtagccgggaccacaggcacttgccaccatgcccaactaatttttgtatttttagtagagacggggtttcgccctgttggccaggctggtctcgagctcctgacctcaagtgatcctcctgccttggcctcccaaagtgatacaggtgtgagccaccacacccagcatatatgatctttttcttaatcctattcactttcatgattattaagattattataaatttattgtagaagtacagatatatgtgtaaatgtagaaatataatttttagtaacacattcacgacttggtgtcaggcgaattaaagtttcactatctgcacatgatacctaagtttttctcagtatccagaatgagcattacttctccctagcctatctctgatgataactaaccttttaaactcatcaactggacaggtttcatagcggcagacattaaaggtacaggttcctggactcagctctatttgattactgattaccatgaaaatggatctctctatgacttcctgaaatgtgctacactggacaccagagccctgcttaaattggcttattcagctgcctgtggtctgtgccacctgcacacagaaatttatggcacccaaggaaagcccgcaattgctcatcgagacctaaagagcaaaaacatcctcatcaagaaaaatgggagttgctgcattgctgacctgggccttgctgttaaattcaacaggtgagtggttctttgccccactgttttgaaattattttaatttccaaaagatatttccctatttgtattcaagataatggaattctaaaaatgtgcatatgcttgtttttagttacataaatgtatagttgggggggattttgttctttttacaaaaattgtgtcctacttctcctatacataattcttgatatatatatatttttttggtgtttttttttgtttgttttttgttttttgttttttgttttttttaaagacagtgtctcactcagttgcccaggctggaatatagtagtgtgatcttagctcactgcaacctcgacctcatgggctcaagcaatcctcccacctcagcctcctgagtagctgggactacaggcatgcactgccacacctagctaatgtttttattttttgcggagatggggtctcactgtgttgcctaggctggtctcaaactcctaggctcagctgatcctcccaaagtgctgggatta

SEQ ID NO: 72 - DNA, 1176 bp, Homo sapiens
taacttttgtattttatagagacagtgttttaccatgttggccaggctgatcttgaacacctgacctcaggtgatgcgcccgccttggcctcccaaagtgctgagattacaggcatgagcaaccgtgcctggcttaactttatcttatattcagtgttgtcctctttcttagacaccagacttatttagtgacaaaacctgacctgaacggatgtgaggtgtgtattgcccttatccagttgaggaggactatcggacttagtgttttgctgtagacacagtactgagtactgagttggattaagagtgctgccccaaccctgctgaggatgtcatgtagtatgtagcatgtatttaaagaaaaatctgaaaaatgctaaattccacaatgcatctggccccaaggagaaaaagaagcttttataaaataggacaaaaatacaagataaactattttatttttggccctcaacttggaccttggctttcttttgtttcagtgacacaaatgaagttgatgtgcccttgaataccagggtgggcaccaaacgctacatggctcccgaagtgctggacgaaagcctgaacaaaaaccacttccagccctacatcatggctgacatctacagcttcggcctaatcatttgggagatggctcgtcgttgtatcacaggaggtgggagtttgagtagtttctgattatgttgatttactcatcattttaaaaataacagctccagttatataactttttagtttttaatttttgtgggcacatagtaggtgtatatattattggataaggagttattttgatacaggcatgccatgtgtaataatcacatcttggagaattggatatctgtcccttcagacatttatcctttgtttcaccaaccagttatactccttgagttatttttaagtgtacaattaaattattactaactgtagtcctccccgttgtgctataaaataccaaatacttattcattcttctattttgtctctacttattaaacatccccccccatctgctgctacccttcccaacctctggtaaccatccttctgttctccatgagttcagttgttttgatttttagatctcacaagtaagtgagaacatgtgaagtttgtctttctgtgcctggcttattttacttaacgttatga

SEQ ID NO: 73 - DNA, 1131 bp, Homo sapiens
tccatgtagggaactgtttaccatttgtgtacccgggcactggccaaggccaaaccttgcaagccgcctttcctaagggaaggtctcaggcctgctgtgtgaacccttatctgcacctcataagtctttctactgcagagcaaaatgaaacaaaataataaaaactattcattagtaggaacaaccatataagtaaataattatactttagggtaaatggctgatttcgccttgcttattttttttaaggaagattgatatgccctttgtcgatggactctatcacagttgtgatgacatccctggtggaggtagaggaaatagttggacataaataagagaaaaacatacatctactattaagagtgaatcatagtgtctatattttttcttgtgtaagaatccgttttagttccatagtttagcaaaagatgcttactagattggtatatcttgtccagcaaccatttttgtgcccatgttttctcattcccttatagggatcgtggaagaataccaattgccatattacaacatggtaccgagtgatccgtcatacgaagatatgcgtgaggttgtgtgtgtcaaacgtttgcggccaattgtgtctaatcggtggaacagtgatgaagtgagtggaactcagtcccctgaagaagtgattcgtaaatgccaccaaatatattctctgctcactgaacatctctttacttttcagtgtctacgagcagttttgaagctaatgtcagaatgctgggcccacaatccagcctccagactcacagcattgagaattaagaagacgcttgccaagatggttgaatcccaagatgtaaaaatctgatggttaaaccatcggaggagaaactctagactgcaagaactgtttttacccatggcatgggtggaattagagtggaataaggatgttaacttggttctcagactctttcttcactacgtgttcacaggctgctaatattaaacctttcagtactcttattaggatacaagctgggaacttctaaacacttcattctttatatatggacagctttattttaaatgtggtttttgatgcctttttttaagtgggtttttatgaactgcatcaagacttcaatcctgatt

SEQ ID NO: 74 - DNA, 2595 bp, Homo sapiens
ggctgatttcgccttgcttattttttttaaggaagattgatatgccctttgtcgatggactctatcacagttgtgatgacatccctggtggaggtagaggaaatagttggacataaataagagaaaaacatacatctactattaagagtgaatcatagtgtctatattttttcttgtgtaagaatccgttttagttccatagtttagcaaaagatgcttactagattggtatatcttgtccagcaaccatttttgtgcccatgttttctcattcccttatagggatcgtggaagaataccaattgccatattacaacatggtaccgagtgatccgtcatacgaagatatgcgtgaggttgtgtgtgtcaaacgtttgcggccaattgtgtctaatcggtggaacagtgatgaagtgagtggaactcagtcccctgaagaagtgattcgtaaatgccaccaaatatattctctgctcactgaacatctctttacttttcagtgtctacgagcagttttgaagctaatgtcagaatgctgggcccacaatccagcctccagactcacagcattgagaattaagaagacgcttgccaagatggttgaatcccaagatgtaaaaatctgatggttaaaccatcggaggagaaactctagactgcaagaactgtttttacccatggcatgggtggaattagagtggaataaggatgttaacttggttctcagactctttcttcactacgtgttcacaggctgctaatattaaacctttcagtactcttattaggatacaagctgggaacttctaaacacttcattctttatatatggacagctttattttaaatgtggtttttgatgcctttttttaagtgggtttttatgaactgcatcaagacttcaatcctgattagtgtctccagtcaagctctgggtactgaattgcctgttcataaaacggtgctttctgtgaaagccttaagaagataaatgagcgcagcagagatggagaaatagactttgccttttacctgagactttcagttcgtttgtattctacctttgtaaaacagcctatagatgatgatgtgtttgggatactgcttattttatgatagtttgtcctgtgtccttagtgatgtgtgtgtgtctccatgcacatgcacgccgggattcctctgctgccatttgaattagaagaaaataatttatatgcatgcacaggaagatattggtggccggtggttttgtgctttaaaaatgcaatatctgaccaagattcgccaatctcatacaagccatttactttgcaagtgagatagcttccccaccagctttattttttaacatgaaagctgatgccaaggccaaaagaagtttaaagcatctgtaaatttggactgttttccttcaaccaccattttttttgtggttattatttttgtcacggaaagcatcctctccaaagttggagcttctattgccatgaaccatgcttacaaagaaagcacttcttattgaagtgaattcctgcatttgatagcaatgtaagtgcctataaccatgttctatattctttattctcagtaacttttaaaagggaagttatttatattttgtgtataatgtgctttatttgcaaatcacccactcctttacaaccatactttatatatgtacatacattcatactgtagaaaccagctcatgtgtacctcatatcccatccttaagagaagaaatgttataaagtagaactaaatataaattttcagaattaatgcattcaaagtaatatatcaaatccaggactttgttaacttcaggtaaaaacttcattagggtaatatcatctcaattttttcaaatgaaaggattctctaattagaaatttatatgtcagagctgttataaatttatcaactgtcaaatatgttctggacagctaaatcatttgagatttttggttttttgatttctattccctaacttgtgaagacaatgaaaaatcaggcagaaatatttagtatctagtcagtatctgtagctacactgtataactgttcttcaataaaatggttcatattttatagatgccttgttatctcaagaaatctgatttacataaacttatacttctttaatgctttttaaatatttattctgagcaaacaattcatgagtacatcaagtgagatagttttatttgattataacataaaataaatgtgattatatcacatcatcatcaaaaaggtttaaattaaatgggaggaaatcagcatatgtccacccattaccaaaatttgactatcatttaaggttaaaacttacaaatttgtctgcacatcaaatttcacaaatttgaaaattgccttaaccattttgattaataagtttcatctgccataattaaagtctgaagtgttcatcaagataagtaaatttgcatatggataatacccaataacttgttttttcagaatttttcaccatatgtatactgagaaatacaaatattttaatctgcgttgccgtatgatatgattgcacttagaacacccaatttacttaaatcttggtttacttttgac

SEQ ID NO: 75 - DNA, 1500 bp, Homo sapiens
taaaagggaagttatttatattttgtgtataatgtgctttatttgcaaatcacccactcctttacaaccatactttatatatgtacatacattcatactgtagaaaccagctcatgtgtacctcatatcccatccttaagagaagaaatgttataaagtagaactaaatataaattttcagaattaatgcattcaaagtaatatatcaaatccaggactttgttaacttcaggtaaaaacttcattagggtaatatcatctcaattttttcaaatgaaaggattctctaattagaaatttatatgtcagagctgttataaatttatcaactgtcaaatatgttctggacagctaaatcatttgagatttttggttttttgatttctattccctaacttgtgaagacaatgaaaaatcaggcagaaatatttagtatctagtcagtatctgtagctacactgtataactgttcttcaataaaatggttcatattttatagatgccttgttatctcaagaaatctgatttacataaacttatacttctttaatgctttttaaatatttattctgagcaaacaattcatgagtacatcaagtgagatagttttatttgattataacataaaataaatgtgattatatcacatcatcatcaaaaaggtttaaattaaatgggaggaaatcagcatatgtccacccattaccaaaatttgactatcatttaaggttaaaacttacaaatttgtctgcacatcaaatttcacaaatttgaaaattgccttaaccattttgattaataagtttcatctgccataattaaagtctgaagtgttcatcaagataagtaaatttgcatatggataatacccaataacttgttttttcagaatttttcaccatatgtatactgagaaatacaaatattttaatctgcgttgccgtatgatatgattgcacttagaacacccaatttacttaaatcttggtttacttttgacttgataccataatctttaaaatcatttgtcatctttttttttttttttttgagacggagtctcgctctgtcgcccaggctggactgcggactgcagtggcgcaatctcggctcactgcaagctccgcttcccgggttcacgccattctcctgcctcagcctcccgagtagctgggactacaggcgcccgccaccgcgcccggctaattttttgtatttttagtagagacggggtttcaccttgttagccaggatggtctcaatctcctgacctcatgatccacctgcctcggcctcccaaagttcatttgtcatcttaataaaaatataaagacaggcaaagtttattggaaatgttcaaatggtgtgtggaagcaaaaaattacagccagtatatgagaccactattatggttttttaaaattaacttggtctagtaaaagtgatatcaagagttaatcttagaaacttgctcagtaaaaacattttctagtataacat

SEQ ID NO: 76 - DNA, 2949 bp, Homo sapiens
cgcctcccttccccctccccgcccgacagcggccgctcgggccccggctctcggttataagatggcggcgctgagcggtggcggtggtggcggcgcggagccgggccaggctctgttcaacggggacatggagcccgaggccggcgccggcgccggcgccgcggcctcttcggctgcggaccctgccattccggaggaggtgtggaatatcaaacaaatgattaagttgacacaggaacatatagaggccctattggacaaatttggtggggagcataatccaccatcaatatatctggaggcctatgaagaatacaccagcaagctagatgcactccaacaaagagaacaacagttattggaatctctggggaacggaactgatttttctgtttctagctctgcatcaatggataccgttacatcttcttcctcttctagcctttcagtgctaccttcatctctttcagtttttcaaaatcccacagatgtggcacggagcaaccccaagtcaccacaaaaacctatcgttagagtcttcctgcccaacaaacagaggacagtggtacctgcaaggtgtggagttacagtccgagacagtctaaagaaagcactgatgatgagaggtctaatcccagagtgctgtgctgtttacagaattcaggatggagagaagaaaccaattggttgggacactgatatttcctggcttactggagaagaattgcatgtggaagtgttggagaatgttccacttacaacacacaactttgtacgaaaaacgtttttcaccttagcattttgtgacttttgtcgaaagctgcttttccagggtttccgctgtcaaacatgtggttataaatttcaccagcgttgtagtacagaagttccactgatgtgtgttaattatgaccaacttgatttgctgtttgtctccaagttctttgaacaccacccaataccacaggaagaggcgtccttagcagagactgccctaacatctggatcatccccttccgcacccgcctcggactctattgggccccaaattctcaccagtccgtctccttcaaaatccattccaattccacagcccttccgaccagcagatgaagatcatcgaaatcaatttgggcaacgagaccgatcctcatcagctcccaatgtgcatataaacacaatagaacctgtcaatattgatgacttgattagagaccaaggatttcgtggtgatggaggatcaaccacaggtttgtctgctaccccccctgcctcattacctggctcactaactaacgtgaaagccttacagaaatctccaggacctcagcgagaaaggaagtcatcttcatcctcagaagacaggaatcgaatgaaaacacttggtagacgggactcgagtgatgattgggagattcctgatgggcagattacagtgggacaaagaattggatctggatcatttggaacagtctacaagggaaagtggcatggtgatgtggcagtgaaaatgttgaatgtgacagcacctacacctcagcagttacaagccttcaaaaatgaagtaggagtactcaggaaaacacgacatgtgaatatcctactcttcatgggctattccacaaagccacaactggctattgttacccagtggtgtgagggctccagcttgtatcaccatctccatatcattgagaccaaatttgagatgatcaaacttatagatattgcacgacagactgcacagggcatggattacttacacgccaagtcaatcatccacagagacctcaagagtaataatatatttcttcatgaagacctcacagtaaaaataggtgattttggtctagctacagtgaaatctcgatggagtgggtcccatcagtttgaacagttgtctggatccattttgtggatggcaccagaagtcatcagaatgcaagataaaaatccatacagctttcagtcagatgtatatgcatttggaattgttctgtatgaattgatgactggacagttaccttattcaaacatcaacaacagggaccagataatttttatggtgggacgaggatacctgtctccagatctcagtaaggtacggagtaactgtccaaaagccatgaagagattaatggcagagtgcctcaaaaagaaaagagatgagagaccactctttccccaaattctcgcctctattgagctgctggcccgctcattgccaaaaattcaccgcagtgcatcagaaccctccttgaatcgggctggtttccaaacagaggattttagtctatatgcttgtgcttctccaaaaacacccatccaggcagggggatatggtgcgtttcctgtccactgaaacaaatgagtgagagagttcaggagagtagcaacaaaaggaaaataaatgaacatatgtttgcttatatgttaaattgaataaaatactctctttttttttaaggtgaaccaaagaacacttgtgtggttaaagactagatataatttttccccaaactaaaatttatacttaacattggatttttaacatccaagggttaaaatacatagacattgctaaaaattggcagagcctcttctagaggctttactttctgttccgggtttgtatcattcacttggttattttaagtagtaaacttcagtttctcatgcaacttttgttgccagctatcacatgtccactagggactccagaagaagaccctacctatgcctgtgtttgcaggtgagaagttggcagtcggttagcctgggttagataaggcaaactgaacagatctaatttaggaagtcagtagaatttaataattctattattattcttaataatttttctataactatttctttttataacaatttggaaaatgtggatgtcttttatttccttgaagcaataaactaagtttctttttataaaaa

SEQ ID NO: 77 - DNA, 1500 bp, Homo sapiens
gtaattgggcttctcaaagataattgacctcttctctcccaattgttttcatgcgtattttgcagagaatgcttggaatattctgttcatgaaaggcacaaagtacataaaatattttgagtgattttcttcaaaataaaaatgattagttttgatgcttcagatgtctagaatgctatgtgccttgtacaggccctacggcatggaaagtgctcaactgatatttgttaaatgaatgaatctggaaaacgaaaaatacacgaaatattttattcctcaacaatgaagaaaaagctttcagacttccatttagactcgttttaactggctgaattcttcaatgaaaagaaaacacgcgtcgcactgctaatttagctgttcctaaatatatttccatcaaattctgcttggctgtttcaaccttggggttgaagttcttattttgatgacacagagacgttcattgcagtggaaatagcaagtagtattggcttccccgccttcctccctctaggatttcaacttctcctcctcgaacaccagccctgctcttctagtaaatcccacattacagaacaggctgaggacggaggagacaagaggaaagtaggaaaccggagccatggaaacggcggagcggaggcaaagtgtgagagcgcgggtggttagaagggaaaaaaccctccccggacgacggcgcgaaggcgcgcctcagattacgtcacgcaccggggtgacgtcacgaccgtgacacgcgggtgacgccgttgccgcggcgacttctcgtcgtctccgcccccttcccccgctcccccccgcacccccgcctagcgtccttcccccaatcccctcaggctcggctgcgcccggggccgcgggccggtacctgaggtggcccaggcgccctccgcccgcggcgccgcccgggccgctcctccccgcgccccccgcgccccccgctcctccgcctccgcctccgcctccgcctcccccagctctccgcctcccttccccctccccgcccgacagcggccgctcgggccccggctctcggttataagatggcggcgctgagcggtggcggtggtggcggcgcggagccgggccaggctctgttcaacggggacatggagcccgaggccggcgccggcgccggcgccgcggcctcttcggctgcggaccctgccattccggaggaggtgagtgctggcgccaccctgccgccctcccgactccgggctcggcggctggctggtgtttattttggaaagaggcggcggtgggggcttgatgccctcagccaccttctcgggccagctccgcgggctgggaggtgggcatcgcccccgtgtccctctccgtcatgcagcgccttcctacgtaaacacacacaatggcccggggggtttccctggcccccaccccagatgtggggattggggcagcggtggttgagcgggaggctatcaatagggggcgaaactcagggttggtccgaga

SEQ ID NO: 78 - DNA, 1199 bp, Homo sapiens
cttcctccctctaggatttcaacttctcctcctcgaacaccagccctgctcttctagtaaatcccacattacagaacaggctgaggacggaggagacaagaggaaagtaggaaaccggagccatggaaacggcggagcggaggcaaagtgtgagagcgcgggtggttagaagggaaaaaaccctccccggacgacggcgcgaaggcgcgcctcagattacgtcacgcaccggggtgacgtcacgaccgtgacacgcgggtgacgccgttgccgcggcgacttctcgtcgtctccgcccccttcccccgctcccccccgcacccccgcctagcgtccttcccccaatcccctcaggctcggctgcgcccggggccgcgggccggtacctgaggtggcccaggcgccctccgcccgcggcgccgcccgggccgctcctccccgcgccccccgcgccccccgctcctccgcctccgcctccgcctccgcctcccccagctctccgcctcccttccccctccccgcccgacagcggccgctcgggccccggctctcggttataagatggcggcgctgagcggtggcggtggtggcggcgcggagccgggccaggctctgttcaacggggacatggagcccgaggccggcgccggcgccggcgccgcggcctcttcggctgcggaccctgccattccggaggaggtgagtgctggcgccaccctgccgccctcccgactccgggctcggcggctggctggtgtttattttggaaagaggcggcggtgggggcttgatgccctcagccaccttctcgggccagctccgcgggctgggaggtgggcatcgcccccgtgtccctctccgtcatgcagcgccttcctacgtaaacacacacaatggcccggggggtttccctggcccccaccccagatgtggggattggggcagcggtggttgagcgggaggctatcaatagggggcgaaactcagggttggtccgagaaggtcacgattggctgaagtatccagctctgcatctctgtggggtgggggcggcggcggcctcgacgtggaggatataggttagttgctggggctgagacaacagcccgagttactgtcgcgtgtaattcttacatggtcgtggggatgatggggctcatcatttcctctctcctctcccggactgccccccttctcag

SEQ ID NO: 79 - DNA, 1102 bp, Homo sapiens
tataaccattagggagtaaaatatatgcatattgacgtggagagacttctgagacattactccatgaaaaaagcaagtgttaaaagtattttatatatagtatttaattatatgtgtacatttcatatatgtatgtcttaatgttttttccatgagtaaaagggagacatggaaggctgctcaccaaaccataaacagaacttaacctttttgaaagggggcctgggaatgtgaggaagatgaagagagatttcatggtttattctgaatattcatgtattctttgaatcttttatagttgagaatacgttgtattactagtgtagaaaaaaatttaaagatgtttcataataaaagagaaaaaccactgtactaaatgatctctaagctcaaaatttgaggaacactggcagttactgtgatgtagttgtctatgttaaaatatttctaattcatatactaagtgatttttatttaaattcttttgaaatattttttaggtgtggaatatcaaacaaatgattaagttgacacaggaacatatagaggccctattggacaaatttggtggggagcataatccaccatcaatatatctggaggtaagcttttgagtatcatatctagtaattttgaaaagaaaaaaaatgaacttataaaaacatttgtactgataatcttgattattttaggaggtgggattaggaatagatttgggaagagagaattagctttgcctgtattatacttcttaatcttgttttgtgtcacttgttaaaataaacatgtattttataatttagaaaacatcagaactaagggggaagtgatataaatttcaaggtattactctgaattaaatttttatttttatttttattttatttatttatttttttttgagacggagtctcgctctgtcgcccaggctggagtgcagtgacacaatctcagctcactacaacctccgcctcccagcttcagacgattgtcctgcctcagcctcctgagcagctgggactacaggcgcacattaccacgtccacctaattttttctatttttagtagagatggggtttcaccatattggccaggctggtc

SEQ ID NO: 80 - DNA, 1264 bp, Homo sapiens
taaattttggggtttttttggacaaatccttaatacctcatgtccttttcaacttctttttctgttgagagagagagagaacgaatggaattcatatgcctacaacttttccgggacaaaataattcttttaatgggaggaacacttttccttgatacagtgttttatcttacgttagacatgatttggaaggtaaatataagtggaccagaaaattggaaatactgtgcttttttattattcatggaccatctagatatcacatatgtataggtcaaatttatcaggtgtaatatagtgtagtgtctaataacaaagaatttatcaatttaaaggtgaaagtattcatttatagtatttctggcacttattttgtaatttgaaacttaaaaccctatcaactggtgaaaagattataatcaaaggctaaaattttatattctcttttgttaatgtcaggacaaagtccggattgaatataagtctgctttattttataggcctatgaagaatacaccagcaagctagatgcactccaacaaagagaacaacagttattggaatctctggggaacggaactgatttttctgtttctagctctgcatcaatggataccgttacatcttcttcctcttctagcctttcagtgctaccttcatctctttcagtttttcaaaatcccacagatgtggcacggagcaaccccaagtcaccacaaaaacctatcgttagagtcttcctgcccaacaaacagaggacagtggtgagtcagttttaatatcaccattttgctgtttctttgtatttttcagacagatcagttgttgaaaattaatatattattacttcatactcagaggtcatgcaaatagaggcatccatgtcatacaggaatgaaaaatatgtaattatttggtggcaaagtctatattccttaactgaaataaatggtattgtctctagtgttggatttgacatttaaacctgtctgccaaacttgaaccacagtcatgtctaagcactagtttaaaataaatcaggattttaagacttgagcttgttcattatctaatgtgtgtcaggtaagactcattcttcacccttgagaaatctcctttctgagttatattatcagatgttgaacgttcagtgtgattgatatgtttcccctcatctacttcatttttggttgttgaatattagtattaaccattggaacagcgtaccctgtaagtaacatttgaagcatttaaagagaaatct

SEQ ID NO: 81 - DNA, 1104 bp, Homo sapiens
aaacaggggcaccaaacaacaaatatcaagtatacatgttaagacaggtttttttcttcccgctatgtttagggccagtaagaggtctcttaaggacagtcagtgtgattgaagggttatacagttttcagctttgaacagtattggatcaaaattgattttgcttttaatattgacatctattattgctcagtgatggatatactgcgttggtgggtatattgtagcagatactgttacttcttctttttatatgtttaaagtatttcataattttaataaaatagaaaattaactttgctttgatttaagttggtgaataataacaaatatttgggttataatttccctttagtattaagttagctgtagaaatggtgttgtatctgacctagtaacccatttgactttttaaagatgaattactaaatttttttaatgatatgaaaaaatgtaatttgctccctttacctcttatcaatatatttatgataccataggtacctgcaaggtgtggagttacagtccgagacagtctaaagaaagcactgatgatgagaggtctaatcccagagtgctgtgctgtttacagaattcaggatgggtatggtttgtatgtgacgtgaaattttgtttaaaaagaaaatcacacattaaactttgaagttttcttaggatctttaccaaaacctagggaattgaaagtgtactttaggaaaaagtattaaaataatactaagttagcctgaagaaatactgtaggccatatgaggagttaaataattgtatatgactgtagggtttgttactttgatcaaatgattttatttggaatttgagattcttacaatttttgaaccattcagagtgtgatttatttggataatagactcttacccccctcccatttttaatacaaactcatagtttcacaaaaggtatatcaaaattaacattttatattgacctacttttctttcagaaagtgtctaacattgttccaagaccctcacattttgaatcctctttaaaaaaaaaaaaattattttgggggcatgttgtccctgtcccttgagtactctttttccttgaatggatagataa

SEQ ID NO: 82 - DNA, 1103 bp, Homo sapiens
aaaaggtatatcaaaattaacattttatattgacctacttttctttcagaaagtgtctaacattgttccaagaccctcacattttgaatcctctttaaaaaaaaaaaaattattttgggggcatgttgtccctgtcccttgagtactctttttccttgaatggatagataagtccgtacctgtgattttttttttttttttttttttttttggaccccaggaacaatccattttctgctgttgtaggtcttttctggagctgacttgaagaaaagagtacatctctttaccctgctgtttgtccaagagtgatacatttatttggggtaaacttaaaattaatttattgccatttaaatttctaacgatggaatattagggagccaaacctccctcactgttactagcccctcgataaccaattttcatatcttcagcatgaggtatatgaatatttttaggtgtaataaccaagaaaggcttgtgtctacatttttcagagagaagaaaccaattggttgggacactgatatttcctggcttactggagaagaattgcatgtggaagtgttggagaatgttccacttacaacacacaactttgtatgtatctttacatttttttttgaaatgtcaaaaatgtttagattttaatgaatgaatttttatttagggaatgtgaaatatggatgagtaattttggaactgacattttacctgagttgaaatcagttgttttctttaaaaacttgtatttaaacaagagtttaattttaatctttatactttctttttaatttaaaaaagtaaaatgtatgcattgttaaaagataattttgaatagtgcagaagtatgtcaagtaaaaaaagtgaaaataccctcctagaggccaacatttgtttagattaacagattattgttctgtcttccaaacttttttctgtgtacacaaacgtgtgcttgtacctgtaagcctaaagttttttcctttctttttttctctctttccttcattactttcttttcttttccctttcttaaatcaaagtagagccatgctatgtgatattctttgccttatttttttttaattcaacaggat

SEQ ID NO: 83 - DNA, 1149 bp, Homo sapiens
tagctcatttatagttcttcctctccctcctctcccccaatatttttattagtagttttttggttcttctattgggtgcctttgtaactttaatatatgcctttcttgttccgtcaacaccagtcggcatttcttaacctcccttctttgtatgataattaaagtataggcttcttcctttcacctctgtttcctcctccttttcatgtctacttttacttttatgttgtcaagcttgaaatcagttgccagccttttactcatttctcattttttaacttctgggtttttaagttagatagtggggtgggaaataaatatgtgtagtccatctattatcttgaacccccggttttcattttataatagtactttagtatgtgagtttcatgatataaatatattacaactttgttattttaaacaagagagtagatacgtcagtttctagaaagttttcttgtgagtttttgaaatctctgtgattttttactttgcaggtacgaaaaacgtttttcaccttagcattttgtgacttttgtcgaaagctgcttttccagggtttccgctgtcaaacatgtggttataaatttcaccagcgttgtagtacagaagttccactgatgtgtgttaattatgaccaacttgagtaagtaatccaaaaatatctcttttctacctaccattttacacttaaattttcttaatgtgaagctacgatgtctaaaagtctgtgagggtttttcttccatacgattgttatagagaattttttttaagtgtagttagagaataatatgtggaatggacagtatttctctcccaaattgtaatgctggttcagctatacagttaatttatattttatattatcgtttaattaatcaagacccctaacccatagaaaccatttttggatagtttctaggaggagagggagagttgtttcaattaaattaagcattatgattttgtaccacagatcaggtagtctgattctgttagctattttgtaaattacgtttatattcttcctctctctccttcatccccattcagctcccttcccccaatttatttgagtaagatgtaaaatttttgtatccagtatatatctctttctaaaatttctctttgctgtatgccagt

SEQ ID NO: 84 - DNA, 1120 bp, Homo sapiens
tgagtaagatgtaaaatttttgtatccagtatatatctctttctaaaatttctctttgctgtatgccagtttttctaatagattagactgagtctattatctctttttgtgtcattggtgctgctgctgttaaagtcttacttttcttgatcacctgagcaaataaaacttaactctgtactttaagtaaattataatgtcacctaatttacagtagatactttttattctcattctttaaccataaagcatgattttcatcttgtagtatgtagaaatttgctgaactgaatgattagttttaagttataagcatgcctttgaaagtgcaatacaattttttttaaaataagcctttagacaaaaatacaactaattgaattttaacagttgtttctgagaatggaatttgatctcagtttttttggttaactatgtattttggtatatgaagcttctgggttttgcacaagttaggtttgttttgttttgcctcacagtttgctgtttgtctccaagttctttgaacaccacccaataccacaggaagaggcgtccttagcagagactgccctaacatctggatcatccccttccgcacccgcctcggactctattgggtatggtttgacttctgctcttgggcgacatgctacttgaaccgctttcttttggatctcctggttaattagaaacctttccaatgtttaaattgttaaattaaggactttttccccaaataacttatcataccactcagatatttacatgcatttgatacaaataaatgggattaaagctgacatagactatttcagaatcagtcctgaaaaaatcaatattgggtatgatttgacttctgctcttcagtgacatgcttcttgaactgctttcttttggatctcctggttaattagaaacatttccaacatttaaatgcttaaattaaggatcttttccccaaataacttattttatcacaccagtcagatatttacttgcatttggtacaaataagtgggattaaagctgacatagactatttcagaaccagtcctgaaaaaatcatgcaacagatcattttgagtctacaccttgagttcatcttttattaggtata

SEQ ID NO: 85 - DNA, 1160 bp, Homo sapiens
gattttcattcaactcctgtaaaggaacaagtacatcattcaggtcctgaaatatgcatttgtattctcaaaatatttataatttcttaatatgtaaaattttcattttagtaaattcagatgtcaagacaatgttagaaaaaaatggcaaattatattcagtcattctcagagcatttttatataacttcaaaggttgaacttcttcagttgatggccacaggtaatttctagccataagtaaatttccctagtgttttccaggtaagaatcagtggtcttatcattgatagttcctggagggcctacttgagcaaagcagctttggcagtattggatttttaaattaatacttttaaaagtcattactgctaggtttttaatgctttaatgattttgagaatataaaaacaagaaaatccttttatcttcctttttaaatattattacctttatatcgttactctgaatcttatcttccaatgacttcatttttccaggccccaaattctcaccagtccgtctccttcaaaatccattccaattccacagcccttccgaccagcagatgaagatcatcgaaatcaatttgggcaacgagaccgatcctcatcagctcccaatgtgcatataaacacaatagaacctgtcaatattgatgtaagtatccagcattgctagaactaaaaaaaaaccaagtatgtatctttatttttctgctataattataacttagatcagaaataagtgccatttttcatttatcacagttattttaagtgataagcttcttgtgaatcacaaatcagaaaagcttctggtttctctctgatgacattaaatatttcactgactccaggttatacagtcactctgatttttttcccttatgataccatctctataaaagtcatcttcaaatgaaaatggtttaaatatcaaaggactgatagaagcccttgacagaattaagttctttaaaacttttataaaaatgattatgattgtgctataagaggtggatatgaaattaagaatttcaggccaggcatagtggctcatgcctgtaatcccaacactttgggaggccaagatgggtggaacgcttgacccagaagttagagaccagcctaggcaacatagtgagaccccatctctac

SEQ ID NO: 86 - DNA, 1037 bp, Homo sapiens
cacagcggtttgccacacagattatcccattacctcggtatgaagcacagcatccattagttattctttctgttgctcttcctccttttaccatccaccctccaacaggccccagtatgtgttgtttcccccatgtgtccacttgttcttatcattcagctcccacttataagtgagaaaacacagtatttggttttctgctcctgcattagattgttgaggataatggaagccattggttttgaatggcctgaaatggacatcaacatttgattaggactaataattgtttcattataggtttacattggcaagtgcttcaaaatttagattgtattatgttcactagataattccaaattgttttgtgtaatagttataagatgtattgttttaattaataaaataattcttttaacgttagtggaaaattcagtgttatcgctactctctgattatatgcttgcttggaataaatatacattactatttatttgtaggacttgattagagaccaaggatttcgtggtgatggaggtaagtagtgatttcaggtttttttaaaaactcaaggaaactgcaattgctttgctgcttatttcctttatacttgcctctttcaagtaacagacacagagaaaaatgtgtagagaaacccaaaatttttttgtttttctgtagtgtttgtcatttacctctaataaaatgttaactagtttataacatgagtagaaaagatgactggacataaaaggaagtcttttttttttttttttttttttttgagacggagtctcgctctgtcgcccaggttggagtgcagtggcgcgatctcggctcactgcaagctccgcctcccgggttcacgccattctcctgcctcagcctcccgagtagctgggactacaggcgcctgctaccacgcccggctaattttttgtatttttagtagagacggggtttcaccgtgttagccaggatggtctcgatctcctgacctcgtgatccgcccgcctcggcctcccaaagtgctggga

SEQ ID NO: 87 - DNA, 1137 bp, Homo sapiens
aataagtcagatattttcaacattatggccattattagaaaatgtttccatctggggatttccttttttttaatattgattggctgttgaggtaatattaaataattaattaaaaatgtatttgttatataggcttttacatttattttgctttttgatttttttcatcaaagaaacagaaacttgggagtatttttagtatttctgtcttgttttagagagattgtttttctcctagattttgcaccagtaaataaagtatgtgtctatgtctatcatcagatatcttaaaggtcattaaattggccagaaaactaaaagaaattatagttgtaatcaccaaatgaggcccctttttggcccatcctttccaaaaggtctatatttaaacatgcactacattttaaaattaagtctaaatatcccccaaccttctacccctgataaattaacatacttgctcctccttaatgtatacatttttcttttcactaatttaggatcaaccacaggtttgtctgctaccccccctgcctcattacctggctcactaactaacgtgaaagccttacagaaatctccaggacctcagcgagaaaggaagtcatcttcatcctcagaagacaggaatcgaatggtaagagtatatgatatctttttttctctgaattctttcttcttagaagtcacagccaaatgtaatattatcctttagatatattatgtccatatgtgacacagaattcccataattaaataaatttaagaactgatagttttttgcttaaagcatatttctacggcactgctttttgctgtcatctataatataatttagtaaaaggcagttttggaagagtaacagtattctgttctaaagtaaggaaaaagagagaaagctaatattagaaggcacgaaaaggctggtccagaattcagatatttcagatatctactgaaggacattcttccctatttaaaaaatcaactttcttctgcaaaatgaatccaccatggcacatgtatacgtatgtaacaaacctgcacattctgcacatgtatcccagaacttaaagtaaaatttaaaaataaaaaacgaatactgtttagccgtagtattgctactaattgttgaat

SEQ ID NO: 88 - DNA, 1118 bp, Homo sapiens
tctgagcaaagtatcacaaggacagaaaaccaaacaccacatgttctcactcataggtgggaattgaacagtgagaacacttggacacagggcagggaacatcacacactgggacctgtcatggggtagggggaggggagagggacagcattaagagaaatacctaatgtaaatgacaagttaatgggtgcagcacaccaacatggcacatgtatacataagtaacaaacctgcaagttgtgcacatgtaccctagaacttaaagtataataaaataaaaaataaaaataaattttttccatcctaatattgacttcagtcttaaatttaagttttgtattttaagagtcatacttttaactactattcttccagagaatttttcttaaggggatctcttcctgtatccctctcaggcataaggtaatgtacttagggtgaaacataaggttttctttttctgtttggcttgacttgacttttttactgtttttatcaagaaaacacttggtagacgggactcgagtgatgattgggagattcctgatgggcagattacagtgggacaaagaattggatctggatcatttggaacagtctacaagggaaagtggcatggtaagtatgtaatgtggtgacattgtgacaagtcataataggatatgtttaacaacttttattttgtaaaaaatatcatcaaaggaaatattcactgttcgcatcaataaactattttgattagtttcaggactcctccaaaagtttctaacaaaaattatgggaaataaaaactgttcacagcagtcgggactcctaccattttattacagtaataatttttaaaggggaattcctccaggttaactagtcctcaaaaggattttattttcttttagagtctttcagctgataattttatttgtattataagtcacaagtaaacatattaaaaatgtacttaatggctgggcgcagtggcttatgcctgtaatcccagcactttgggaagctgaggctggctgatcacgaggtcaggagatcaagaccatactggccaacatggtgaaaccccatctctactaaaaatacaaaaattagctgggtgtggaagcacgtgc

SEQ ID NO: 89 - DNA, 1085 bp, Homo sapiens
cagttttagtcattttcctaattgaaagtatcataagtaatccataaatttgaaaaaaatgttaactactctgataaaaaagttttatagtttcctacttttaagcaaaattccatagggcctggtaattgtagtttcaacattacttgcagtttcagttagtaaataaatattaagcctagtaagtataatttaatattgtcaaataatttggaaaataccatgggtacttaattgattttaccaaatttccatggaacaaacaaggttggctattttttggattgatattttgaaatactagtacaggaatatcattgttagttgaatttttagccttagaaaacaaatggagtttagatagctaaagtataatttatttgtgatttaataatggtatggagttagggctatgataattagtgaaaacacccaagaatgttttatacttttaaattttaaaaattgaaatgacacttggagtaacaattgccttttaggtgatgtggcagtgaaaatgttgaatgtgacagcacctacacctcagcagttacaagccttcaaaaatgaagtaggagtactcaggtgagcttgtgtgaattactcttttccagagaaagaagttatttttattagctcctggttcccagtggtagcaactattagctttacagatttactcaaaatgaataaatttgtagaaacagagtatgtctgagtatatttttgtctttaaccacattcttttaagtagtatgcaatgttatatggtatggctgatagaatacttagtcctagactgaattaatggaagtatagtattctgataatataaagtaatagttctacttatgaaaagaatactctccagttttaagcttatcagaatacatttagaggtggtatttagtcctgggctctggaattttagaaacattgacaaactaggatatgcctagtgaggaccacctaaatagggaagattctagaggtgtaacgggggaaaataatcaacagaactgaggatatttagttcacagaaggctgttatgttcaagagagtgcacagttattccagagtgcgg

SEQ ID NO: 90 - DNA, 1177 bp, Homo sapiens
agaggtgtaacgggggaaaataatcaacagaactgaggatatttagttcacagaaggctgttatgttcaagagagtgcacagttattccagagtgcggaaaaaaaagttattccagagagcagaccagggaagcaagccagaggtgaaagttgtaagaaaatgattttgtctcaacacttggaaactttataataccagaaccacttaaataaagatatgagagtcagctacaactgagtgatgaacttcccatagttgaaggtatttaagcaacctctagttgcctgtcagatatatttaaaaagatatctctgcataaagtaggaggttagacttggcaattgccagtctcttctaaatgtatccttttgttgccttttttaaaaaaaaaaaagctttttctgacaacattttaccgacagactactttggttctcttttgtaagaattgctaaagtttgtcgacatttaatgtttactgtcacatttctttgtacaggaaaacacgacatgtgaatatcctactcttcatgggctattccacaaagccacaactggctattgttacccagtggtgtgagggctccagcttgtatcaccatctccatatcattgagaccaaatttgagatgatcaaacttatagatattgcacgacagactgcacagggcatggagtaagttccattcgttaaatgtcttgtaaattatttttgaagaccattgaggatgttttaaaggttttggctgctattcttttggattgcattttaaattactgtccaggaacataaggatgctaactaatggctggtaaataatatgatactaaaaaataaatgtctctgtctagtgcagccttcagaacatatatcaagtatttgataataaatacatgactgcaaacttaggcttagcactcagtgattgagctaagcaagagaggttcagaagatagaaacagcaaaaacctgctaaaaagttgttagcagttgtgcaagtaaacagaatggttgttagttactttttcaaatcagtttctctgagtgcccgtatttttggttgcaaaatggtcagttaataaagttaaagtgaaaaatctgcattctgaccctttttgaggatttcagagtgagttcctatctgttgaattttgctatgcaatttaaggagttat

SEQ ID NO: 91 - DNA, 1047 bp, Homo sapiens
actacataagttgagcagtgaaagagcactttcagttcggttagtcatgggaaagcttcactcaggagttagaatttgtattcagttttaaaggatggatatgaataggtggaaaatagaacgaaagctaacttggagggttgggtgtaggaggggagcattgaacacagtggtgggattaaatatcaaggtatatttaagggacatggataaataggcttgactggagtgaaaggtttgtattggtaactagtaaaagataaagcaaagtcttttaatagaaaacaagattttgactgtaccattatagtgatatgttcctataatcttaaattcatttacagtctattttaatattctgtgaagggtttattacaatgtactattttcagttgtatcatgattctaaataagtctttacacccccaagtatgttctgtagatttcgaggccagagtcctttagccctactcaggttaaaatgatgttttgtttttcagttacttacacgccaagtcaatcatccacagagacctcaagagtaatagtatccttcctgaaatttgtctgcgaagtttgaaaacatcctgactttttcttctgcattttgtcttcacattatgtaaaaacagttttcatgctaagttcgatatactgtaaagagaattaataaaggattgtgcatgcatgtataggagagcaggataccacagcctgcttttggtttctcgacaactgaacattacaagaaaatctatcagaagtctttacaatagtaggagtttttgattgcttgcttacattttatcagcactataaaactgatagttttgtagctatctattagtccctttcagacctctgaccttgctcagtggtagttgagatataactgaagactctaaattatataacaatgaggtgagaaaaacataatatttctcttccctaagtgcagactaagatactatctgcagcatcttcattccaatgaagagcctttactgctcgcccaggagtgccaagagaatatctgggcctacattg

SEQ ID NO: 92 - DNA, 1119 bp, Homo sapiens
ctattagtccctttcagacctctgaccttgctcagtggtagttgagatataactgaagactctaaattatataacaatgaggtgagaaaaacataatatttctcttccctaagtgcagactaagatactatctgcagcatcttcattccaatgaagagcctttactgctcgcccaggagtgccaagagaatatctgggcctacattgctaaaatctaatgggaaagttttaggttctcctataaacttaggaaagcatctcacctcatcctaacacatttcaagccccaaaaatcttaaaagcaggttatataggctaaatagaactaatcattgttttagacatacttattgactctaagaggaaagatgaagtactatgttttaaagaatattatattacagaattatagaaattagatctcttacctaaactcttcataatgcttgctctgataggaaaatgagatctactgttttcctttacttactacacctcagatatatttcttcatgaagacctcacagtaaaaataggtgattttggtctagctacagtgaaatctcgatggagtgggtcccatcagtttgaacagttgtctggatccattttgtggatggtaagaattgaggctatttttccactgattaaatttttggccctgagatgctgctgagttactagaaagtcattgaaggtctcaactatagtattttcatagttcccagtattcacaaaaatcagtgttcttattttttatgtaaatagattttttaacttttttctttacccttaaaacgaatattttgaaaccagtttcagtgtatttcaaacaaaaatatatgtcttataaacagtgtttcatattttattcttaaataaatatgaacccttaaaacgaatattttgaaaccagtttcagtgtatttcaaacaaaaatatatgtcttataaacagtgtttcatattttattctaaattgtttaaagtattttgtgttcaaaatgttctgtgtaccctgttgaaaaaaaaaacaggtatgcaatttaaggcaggtgtgatccacagccattattatggttttgctaagagaactactccttttaacagagaagctgtt

SEQ ID NO: 93 - DNA, 1132 bp, Homo sapiens
tttatcagtcctgaaattctaccattattttctaaggtgtcctcagatgagaaaagttgtttgtaccaatgggaaaacttaaattgtaagacagttactacagtagttgtgctgctcctaagcatcttataaccacaagtctagtatttctttgctgaatcaggaatgggaagtgggaactgattctaatagggtaagtcatgggaagaattcatctggcaatgatggtattttctgcagaaagattgcctaaataattactaaattataaaatcttagtaatacaatacaaaatctctgctaatactgtctctttctgagtatgtagaggtttttttcttcagcttaatcagttttatttctttgactattaagagaattgattacatattagacaggtgttttaatggtaaaagcattgctctaggaattatagtaggttgtttttcagtctttattcaattgaagtgaagaatatttttctttgtatgttctaacaggcaccagaagtcatcagaatgcaagataaaaatccatacagctttcagtcagatgtatatgcatttggaattgttctgtatgaattgatgactggacagttaccttattcaaacatcaacaacagggaccaggtaaatatttaccacgtcttggtgtttattttaccgtctatatacaaggctccagttgtagaaaataagtgttaactcctgggtaagcgtgaaggatagatttcttgattttttgttaccagttttagaaatcgtttgtatacttttggcagtaatagcaacacgttaagtcctttcctcagaatatcagtcatgaatgttacaatggaataaaattcctgattttctgactagaaactacagttacaagaatggatatttcttgaccatcgcacaattagaagaatgagctctgctactatagcatctgggcattatacttttcactgtatcacagattgtgctgtcagaacaggtactcagctatgagatctttatattaaattcttttaaaattactaaggtttcttgaaatctttaatttttaaaactaggtaaatggaagaaatcatgctttgatttttctataatgagaatgctagtaggagggtaatttttta

SEQ ID NO: 94 - DNA, 1135 bp, Homo sapiens
tctggtttgtataaccaagtggcccattagcgtttccacaataaaagggcttaagatgcagatgccaaaacgactgctaaaatgttaacctttttggttttccctacacatatatagaggacttaacacaacgtccaacaacaagaagtgctgaataaattttttttttttttaaagtaaagaagaggcactgtcagatctgttttagatggttaccctgtgagtgggaaaatggactggataaagagagaccaaaagcaggggagcaattagagaacctttgccacagtccaaggatcatgaagatttgagcttgcactccttttgtgggtttcccaccatctatgatgtggcattggttttttaaaactttttattgaggtgtaatacatacatcgtaagctgtaaatgtacagcttattgtgttttcaatgagtgtgaagtatatttttcaacttatctacaaggttgaattatttcccttttttttctctctccagataatttttatggtgggacgaggatacctgtctccagatctcagtaaggtacggagtaactgtccaaaagccatgaagagattaatggcagagtgcctcaaaaagaaaagagatgagagaccactctttccccaagtaagtaaaagcttcatgctatccaaaagaacagactaacattcatagacagatttctgagcacttttttgggcacacagtgtgtatttcatgagtttggattctatgtgcagactccagacaagaaaacacattaagatggcttcatgagggttgagcagtggcacacctagaaattttgggtcctaatacaaaatattcagaaagactttgcatttgtccatcagttctcagacttctcagtctttgaactcttttacacatttaaaaattatcgaagacccccccccccacaaagagcttttgtttatataagttttaattccttattagaaattaaaactattttttaaaatattaatgaattaaacatagtaaaccaatatgttaaataatatttagaaaaaaacagttctattatctaagagaaaaaaattagtgaggagttgtattgttttactttttttgcaaatccctttgcaaaaagaagacagctggat

SEQ ID NO: 95 - DNA, 1758 bp, Homo sapiens
ttctgctttcaattaggtgtatgtaaaacatttcccatggctaggtttctttaaagggcaagtagctgtgataattctgtttagagatagtcataaagtgctttacttatttatactccatcttcttcccaaaagagacttgtggtctataacaaaaaggtataaaattggttttaaatttctattatttactgtttcaagactaacaaatgatctaaaatataaataaaagctgactaagaattactctccccatttaatttacagagagagtttcttcttaagaaaaaataccaattatttacaaatattttcccaagcatttatgacaatgctgaaaacaatgtaagatttcaggtgctttcttgtaaagtgtgatgggactcttaaagatttataccacccagattttcattcttctttctgttttttctttttctttctttctttttttttcttttttctttttttttcttttttttttctttttttttttgtagattctcgcctctattgagctgctggcccgctcattgccaaaaattcaccgcagtgcatcagaaccctccttgaatcgggctggtttccaaacagaggattttagtctatatgcttgtgcttctccaaaaacacccatccaggcagggggatatggtgcgtttcctgtccactgaaacaaatgagtgagagagttcaggagagtagcaacaaaaggaaaataaatgaacatatgtttgcttatatgttaaattgaataaaatactctctttttttttaaggtgaaccaaagaacacttgtgtggttaaagactagatataatttttccccaaactaaaatttatacttaacattggatttttaacatccaagggttaaaatacatagacattgctaaaaattggcagagcctcttctagaggctttactttctgttccgggtttgtatcattcacttggttattttaagtagtaaacttcagtttctcatgcaacttttgttgccagctatcacatgtccactagggactccagaagaagaccctacctatgcctgtgtttgcaggtgagaagttggcagtcggttagcctgggttagataaggcaaactgaacagatctaatttaggaagtcagtagaatttaataattctattattattcttaataatttttctataactatttctttttataacaatttggaaaatgtggatgtcttttatttccttgaagcaataaactaagtttctttttataaattttgagtgcaggtgaccaaaaatattgctgaggagtggcacgtttgacatgagtaaaatgtcttaacttcggatttttagcgggaaaatgttataaattggagtttcttttaaatagctttttttaaaatacattaaggatgtctcgctcatgtagaagtcaaattttgttgcaaacgcattgctcccttcacacccaatctctcccctgcaaaaaatcttcacagaattctgtgagaacttttaggtgtgtttttctttgagatacctctggttgccaaacaccaggtaatagattttttaaagttgttattagattattcttacctctcatgatgcatattttagcaatcaccttatcattgtgtctcatgttctgtcctccttatattctttgcccagcaagattctacttatgatgaatgaatgctcttctccttttttcattcaatggtatgaagtatttgttagggttctttagtacttacactttgttgtg

SEQ ID NO: 96 - DNA, 1500 bp, Homo sapiens
aatactctctttttttttaaggtgaaccaaagaacacttgtgtggttaaagactagatataatttttccccaaactaaaatttatacttaacattggatttttaacatccaagggttaaaatacatagacattgctaaaaattggcagagcctcttctagaggctttactttctgttccgggtttgtatcattcacttggttattttaagtagtaaacttcagtttctcatgcaacttttgttgccagctatcacatgtccactagggactccagaagaagaccctacctatgcctgtgtttgcaggtgagaagttggcagtcggttagcctgggttagataaggcaaactgaacagatctaatttaggaagtcagtagaatttaataattctattattattcttaataatttttctataactatttctttttataacaatttggaaaatgtggatgtcttttatttccttgaagcaataaactaagtttctttttataaattttgagtgcaggtgaccaaaaatattgctgaggagtggcacgtttgacatgagtaaaatgtcttaacttcggatttttagcgggaaaatgttataaattggagtttcttttaaatagctttttttaaaatacattaaggatgtctcgctcatgtagaagtcaaattttgttgcaaacgcattgctcccttcacacccaatctctcccctgcaaaaaatcttcacagaattctgtgagaacttttaggtgtgtttttctttgagatacctctggttgccaaacaccaggtaatagattttttaaagttgttattagattattcttacctctcatgatgcatattttagcaatcaccttatcattgtgtctcatgttctgtcctccttatattctttgcccagcaagattctacttatgatgaatgaatgctcttctccttttttcattcaatggtatgaagtatttgttagggttctttagtacttacactttgttgtgtagaaaatgactgtaatgtggtggtcagtgtattcttactgtgattcagagggaatcaaaagtagaaagcaacagcacgtggtcctatcaaagatttggccatctctgcttcactgtcagcctcttaactatatcttcacttactcaatttggttttgtcatgatttttaaatgtagccaatagatcaaggttcttccagtaaacacatatctgcataaatgcctccttgaagtcaataaagaaggaaattgagaagactttaaattaatgataatttagtttttaagtacccacaaataaatttttgaaacattttctttatttgaatacttagatgtcatccaggaaaatcactcaataataattacggcaaatctttaacccctcatttgggtagcttaagataagtaatgccattatgaatcagaattgattcatgactttagttaagaaaatgaaaaggaacatttcacgtatttttaaaaatgatactaaggaa

SEQ ID NO: 97 - DNA, 7224 bp, Homo sapiens
gtaccttgatttcgtattctgagaggctgctgcttagcggtagccccttggtttccgtggcaacggaaaagcgcgggaattacagataaattaaaactgcgactgcgcggcgtgagctcgctgagacttcctggacgggggacaggctgtggggtttctcagataactgggcccctgcgctcaggaggccttcaccctctgctctgggtaaagttcattggaacagaaagaaatggatttatctgctcttcgcgttgaagaagtacaaaatgtcattaatgctatgcagaaaatcttagagtgtcccatctgtctggagttgatcaaggaacctgtctccacaaagtgtgaccacatattttgcaaattttgcatgctgaaacttctcaaccagaagaaagggccttcacagtgtcctttatgtaagaatgatataaccaaaaggagcctacaagaaagtacgagatttagtcaacttgttgaagagctattgaaaatcatttgtgcttttcagcttgacacaggtttggagtatgcaaacagctataattttgcaaaaaaggaaaataactctcctgaacatctaaaagatgaagtttctatcatccaaagtatgggctacagaaaccgtgccaaaagacttctacagagtgaacccgaaaatccttccttgcaggaaaccagtctcagtgtccaactctctaaccttggaactgtgagaactctgaggacaaagcagcggatacaacctcaaaagacgtctgtctacattgaattgggatctgattcttctgaagataccgttaataaggcaacttattgcagtgtgggagatcaagaattgttacaaatcacccctcaaggaaccagggatgaaatcagtttggattctgcaaaaaaggctgcttgtgaattttctgagacggatgtaacaaatactgaacatcatcaacccagtaataatgatttgaacaccactgagaagcgtgcagctgagaggcatccagaaaagtatcagggtagttctgtttcaaacttgcatgtggagccatgtggcacaaatactcatgccagctcattacagcatgagaacagcagtttattactcactaaagacagaatgaatgtagaaaaggctgaattctgtaataaaagcaaacagcctggcttagcaaggagccaacataacagatgggctggaagtaaggaaacatgtaatgataggcggactcccagcacagaaaaaaaggtagatctgaatgctgatcccctgtgtgagagaaaagaatggaataagcagaaactgccatgctcagagaatcctagagatactgaagatgttccttggataacactaaatagcagcattcagaaagttaatgagtggttttccagaagtgatgaactgttaggttctgatgactcacatgatggggagtctgaatcaaatgccaaagtagctgatgtattggacgttctaaatgaggtagatgaatattctggttcttcagagaaaatagacttactggccagtgatcctcatgaggctttaatatgtaaaagtgaaagagttcactccaaatcagtagagagtaatattgaagacaaaatatttgggaaaacctatcggaagaaggcaagcctccccaacttaagccatgtaactgaaaatctaattataggagcatttgttactgagccacagataatacaagagcgtcccctcacaaataaattaaagcgtaaaaggagacctacatcaggccttcatcctgaggattttatcaagaaagcagatttggcagttcaaaagactcctgaaatgataaatcagggaactaaccaaacggagcagaatggtcaagtgatgaatattactaatagtggtcatgagaataaaacaaaaggtgattctattcagaatgagaaaaatcctaacccaatagaatcactcgaaaaagaatctgctttcaaaacgaaagctgaacctataagcagcagtataagcaatatggaactcgaattaaatatccacaattcaaaagcacctaaaaagaataggctgaggaggaagtcttctaccaggcatattcatgcgcttgaactagtagtcagtagaaatctaagcccacctaattgtactgaattgcaaattgatagttgttctagcagtgaagagataaagaaaaaaaagtacaaccaaatgccagtcaggcacagcagaaacctacaactcatggaaggtaaagaacctgcaactggagccaagaagagtaacaagccaaatgaacagacaagtaaaagacatgacagcgatactttcccagagctgaagttaacaaatgcacctggttcttttactaagtgttcaaataccagtgaacttaaagaatttgtcaatcctagccttccaagagaagaaaaagaagagaaactagaaacagttaaagtgtctaataatgctgaagaccccaaagatctcatgttaagtggagaaagggttttgcaaactgaaagatctgtagagagtagcagtatttcattggtacctggtactgattatggcactcaggaaagtatctcgttactggaagttagcactctagggaaggcaaaaacagaaccaaataaatgtgtgagtcagtgtgcagcatttgaaaaccccaagggactaattcatggttgttccaaagataatagaaatgacacagaaggctttaagtatccattgggacatgaagttaaccacagtcgggaaacaagcatagaaatggaagaaagtgaacttgatgctcagtatttgcagaatacattcaaggtttcaaagcgccagtcatttgctccgttttcaaatccaggaaatgcagaagaggaatgtgcaacattctctgcccactctgggtccttaaagaaacaaagtccaaaagtcacttttgaatgtgaacaaaaggaagaaaatcaaggaaagaatgagtctaatatcaagcctgtacagacagttaatatcactgcaggctttcctgtggttggtcagaaagataagccagttgataatgccaaatgtagtatcaaaggaggctctaggttttgtctatcatctcagttcagaggcaacgaaactggactcattactccaaataaacatggacttttacaaaacccatatcgtataccaccactttttcccatcaagtcatttgttaaaactaaatgtaagaaaaatctgctagaggaaaactttgaggaacattcaatgtcacctgaaagagaaatgggaaatgagaacattccaagtacagtgagcacaattagccgtaataacattagagaaaatgtttttaaagaagccagctcaagcaatattaatgaagtaggttccagtactaatgaagtgggctccagtattaatgaaataggttccagtgatgaaaacattcaagcagaactaggtagaaacagagggccaaaattgaatgctatgcttagattaggggttttgcaacctgaggtctataaacaaagtcttcctggaagtaattgtaagcatcctgaaataaaaaagcaagaatatgaagaagtagttcagactgttaatacagatttctctccatatctgatttcagataacttagaacagcctatgggaagtagtcatgcatctcaggtttgttctgagacacctgatgacctgttagatgatggtgaaataaaggaagatactagttttgctgaaaatgacattaaggaaagttctgctgtttttagcaaaagcgtccagaaaggagagcttagcaggagtcctagccctttcacccatacacatttggctcagggttaccgaagaggggccaagaaattagagtcctcagaagagaacttatctagtgaggatgaagagcttccctgcttccaacacttgttatttggtaaagtaaacaatataccttctcagtctactaggcatagcaccgttgctaccgagtgtctgtctaagaacacagaggagaatttattatcattgaagaatagcttaaatgactgcagtaaccaggtaatattggcaaaggcatctcaggaacatcaccttagtgaggaaacaaaatgttctgctagcttgttttcttcacagtgcagtgaattggaagacttgactgcaaatacaaacacccaggatcctttcttgattggttcttccaaacaaatgaggcatcagtctgaaagccagggagttggtctgagtgacaaggaattggtttcagatgatgaagaaagaggaacgggcttggaagaaaataatcaagaagagcaaagcatggattcaaacttaggtgaagcagcatctgggtgtgagagtgaaacaagcgtctctgaagactgctcagggctatcctctcagagtgacattttaaccactcagcagagggataccatgcaacataacctgataaagctccagcaggaaatggctgaactagaagctgtgttagaacagcatgggagccagccttctaacagctacccttccatcataagtgactcttctgcccttgaggacctgcgaaatccagaacaaagcacatcagaaaaagcagtattaacttcacagaaaagtagtgaataccctataagccagaatccagaaggcctttctgctgacaagtttgaggtgtctgcagatagttctaccagtaaaaataaagaaccaggagtggaaaggtcatccccttctaaatgcccatcattagatgataggtggtacatgcacagttgctctgggagtcttcagaatagaaactacccatctcaagaggagctcattaaggttgttgatgtggaggagcaacagctggaagagtctgggccacacgatttgacggaaacatcttacttgccaaggcaagatctagagggaaccccttacctggaatctggaatcagcctcttctctgatgaccctgaatctgatccttctgaagacagagccccagagtcagctcgtgttggcaacataccatcttcaacctctgcattgaaagttccccaattgaaagttgcagaatctgcccagagtccagctgctgctcatactactgatactgctgggtataatgcaatggaagaaagtgtgagcagggagaagccagaattgacagcttcaacagaaagggtcaacaaaagaatgtccatggtggtgtctggcctgaccccagaagaatttatgctcgtgtacaagtttgccagaaaacaccacatcactttaactaatctaattactgaagagactactcatgttgttatgaaaacagatgctgagtttgtgtgtgaacggacactgaaatattttctaggaattgcgggaggaaaatgggtagttagctatttctgggtgacccagtctattaaagaaagaaaaatgctgaatgagcatgattttgaagtcagaggagatgtggtcaatggaagaaaccaccaaggtccaaagcgagcaagagaatcccaggacagaaagatcttcagggggctagaaatctgttgctatgggcccttcaccaacatgcccacagatcaactggaatggatggtacagctgtgtggtgcttctgtggtgaaggagctttcatcattcacccttggcacaggtgtccacccaattgtggttgtgcagccagatgcctggacagaggacaatggcttccatgcaattgggcagatgtgtgaggcacctgtggtgacccgagagtgggtgttggacagtgtagcactctaccagtgccaggagctggacacctacctgataccccagatcccccacagccactactgactgcagccagccacaggtacagagccacaggaccccaagaatgagcttacaaagtggcctttccaggccctgggagctcctctcactcttcagtccttctactgtcctggctactaaatattttatgtacatcagcctgaaaaggacttctggctatgcaagggtcccttaaagattttctgcttgaagtctcccttggaaatctgccatgagcacaaaattatggtaatttttcacctgagaagattttaaaaccatttaaacgccaccaattgagcaagatgctgattcattatttatcagccctattctttctattcaggctgttgttggcttagggctggaagcacagagtggcttggcctcaagagaatagctggtttccctaagtttacttctctaaaaccctgtgttcacaaaggcagagagtcagacccttcaatggaaggagagtgcttgggatcgattatgtgacttaaagtcagaatagtccttgggcagttctcaaatgttggagtggaacattggggaggaaattctgaggcaggtattagaaatgaaaaggaaacttgaaacctgggcatggtggctcacgcctgtaatcccagcactttgggaggccaaggtgggcagatcactggaggtcaggagttcgaaaccagcctggccaacatggtgaaaccccatctctactaaaaatacagaaattagccggtcatggtggtggacacctgtaatcccagctactcaggtggctaaggcaggagaatcacttcagcccgggaggtggaggttgcagtgagccaagatcataccacggcactccagcctgggtgacagtgagactgtggctcaaaaaaaaaaaaaaaaaaaggaaaatgaaactagaagagatttctaaaagtctgagatatatttgctagatttctaaagaatgtgttctaaaacagcagaagattttcaagaaccggtttccaaagacagtcttctaattcctcattagtaataagtaaaatgtttattgttgtagctctggtatataatccattcctcttaaaatataagacctctggcatgaatatttcatatctataaaatgacagatcccaccaggaaggaagctgttgctttctttgaggtgatttttttcctttgctccctgttgctgaaaccatacagcttcataaataattttgcttgctgaaggaagaaaaagtgtttttcataaacccattatccaggactgtttatagctgttggaaggactaggtcttccctagcccccccagtgtgcaagggcagtgaagacttgattgtacaaaatacgttttgtaaatgttgtgctgttaacactgcaaataaacttggtagcaaacacttccaaaaaaaaaaaaaaaaaa

SEQ ID NO: 98 - DNA, 7287 bp, Homo sapiens
gtaccttgatttcgtattctgagaggctgctgcttagcggtagccccttggtttccgtggcaacggaaaagcgcgggaattacagataaattaaaactgcgactgcgcggcgtgagctcgctgagacttcctggacgggggacaggctgtggggtttctcagataactgggcccctgcgctcaggaggccttcaccctctgctctgggtaaagttcattggaacagaaagaaatggatttatctgctcttcgcgttgaagaagtacaaaatgtcattaatgctatgcagaaaatcttagagtgtcccatctgtctggagttgatcaaggaacctgtctccacaaagtgtgaccacatattttgcaaattttgcatgctgaaacttctcaaccagaagaaagggccttcacagtgtcctttatgtaagaatgatataaccaaaaggagcctacaagaaagtacgagatttagtcaacttgttgaagagctattgaaaatcatttgtgcttttcagcttgacacaggtttggagtatgcaaacagctataattttgcaaaaaaggaaaataactctcctgaacatctaaaagatgaagtttctatcatccaaagtatgggctacagaaaccgtgccaaaagacttctacagagtgaacccgaaaatccttccttgcaggaaaccagtctcagtgtccaactctctaaccttggaactgtgagaactctgaggacaaagcagcggatacaacctcaaaagacgtctgtctacattgaattgggatctgattcttctgaagataccgttaataaggcaacttattgcagtgtgggagatcaagaattgttacaaatcacccctcaaggaaccagggatgaaatcagtttggattctgcaaaaaaggctgcttgtgaattttctgagacggatgtaacaaatactgaacatcatcaacccagtaataatgatttgaacaccactgagaagcgtgcagctgagaggcatccagaaaagtatcagggtagttctgtttcaaacttgcatgtggagccatgtggcacaaatactcatgccagctcattacagcatgagaacagcagtttattactcactaaagacagaatgaatgtagaaaaggctgaattctgtaataaaagcaaacagcctggcttagcaaggagccaacataacagatgggctggaagtaaggaaacatgtaatgataggcggactcccagcacagaaaaaaaggtagatctgaatgctgatcccctgtgtgagagaaaagaatggaataagcagaaactgccatgctcagagaatcctagagatactgaagatgttccttggataacactaaatagcagcattcagaaagttaatgagtggttttccagaagtgatgaactgttaggttctgatgactcacatgatggggagtctgaatcaaatgccaaagtagctgatgtattggacgttctaaatgaggtagatgaatattctggttcttcagagaaaatagacttactggccagtgatcctcatgaggctttaatatgtaaaagtgaaagagttcactccaaatcagtagagagtaatattgaagacaaaatatttgggaaaacctatcggaagaaggcaagcctccccaacttaagccatgtaactgaaaatctaattataggagcatttgttactgagccacagataatacaagagcgtcccctcacaaataaattaaagcgtaaaaggagacctacatcaggccttcatcctgaggattttatcaagaaagcagatttggcagttcaaaagactcctgaaatgataaatcagggaactaaccaaacggagcagaatggtcaagtgatgaatattactaatagtggtcatgagaataaaacaaaaggtgattctattcagaatgagaaaaatcctaacccaatagaatcactcgaaaaagaatctgctttcaaaacgaaagctgaacctataagcagcagtataagcaatatggaactcgaattaaatatccacaattcaaaagcacctaaaaagaataggctgaggaggaagtcttctaccaggcatattcatgcgcttgaactagtagtcagtagaaatctaagcccacctaattgtactgaattgcaaattgatagttgttctagcagtgaagagataaagaaaaaaaagtacaaccaaatgccagtcaggcacagcagaaacctacaactcatggaaggtaaagaacctgcaactggagccaagaagagtaacaagccaaatgaacagacaagtaaaagacatgacagcgatactttcccagagctgaagttaacaaatgcacctggttcttttactaagtgttcaaataccagtgaacttaaagaatttgtcaatcctagccttccaagagaagaaaaagaagagaaactagaaacagttaaagtgtctaataatgctgaagaccccaaagatctcatgttaagtggagaaagggttttgcaaactgaaagatctgtagagagtagcagtatttcattggtacctggtactgattatggcactcaggaaagtatctcgttactggaagttagcactctagggaaggcaaaaacagaaccaaataaatgtgtgagtcagtgtgcagcatttgaaaaccccaagggactaattcatggttgttccaaagataatagaaatgacacagaaggctttaagtatccattgggacatgaagttaaccacagtcgggaaacaagcatagaaatggaagaaagtgaacttgatgctcagtatttgcagaatacattcaaggtttcaaagcgccagtcatttgctccgttttcaaatccaggaaatgcagaagaggaatgtgcaacattctctgcccactctgggtccttaaagaaacaaagtccaaaagtcacttttgaatgtgaacaaaaggaagaaaatcaaggaaagaatgagtctaatatcaagcctgtacagacagttaatatcactgcaggctttcctgtggttggtcagaaagataagccagttgataatgccaaatgtagtatcaaaggaggctctaggttttgtctatcatctcagttcagaggcaacgaaactggactcattactccaaataaacatggacttttacaaaacccatatcgtataccaccactttttcccatcaagtcatttgttaaaactaaatgtaagaaaaatctgctagaggaaaactttgaggaacattcaatgtcacctgaaagagaaatgggaaatgagaacattccaagtacagtgagcacaattagccgtaataacattagagaaaatgtttttaaagaagccagctcaagcaatattaatgaagtaggttccagtactaatgaagtgggctccagtattaatgaaataggttccagtgatgaaaacattcaagcagaactaggtagaaacagagggccaaaattgaatgctatgcttagattaggggttttgcaacctgaggtctataaacaaagtcttcctggaagtaattgtaagcatcctgaaataaaaaagcaagaatatgaagaagtagttcagactgttaatacagatttctctccatatctgatttcagataacttagaacagcctatgggaagtagtcatgcatctcaggtttgttctgagacacctgatgacctgttagatgatggtgaaataaaggaagatactagttttgctgaaaatgacattaaggaaagttctgctgtttttagcaaaagcgtccagaaaggagagcttagcaggagtcctagccctttcacccatacacatttggctcagggttaccgaagaggggccaagaaattagagtcctcagaagagaacttatctagtgaggatgaagagcttccctgcttccaacacttgttatttggtaaagtaaacaatataccttctcagtctactaggcatagcaccgttgctaccgagtgtctgtctaagaacacagaggagaatttattatcattgaagaatagcttaaatgactgcagtaaccaggtaatattggcaaaggcatctcaggaacatcaccttagtgaggaaacaaaatgttctgctagcttgttttcttcacagtgcagtgaattggaagacttgactgcaaatacaaacacccaggatcctttcttgattggttcttccaaacaaatgaggcatcagtctgaaagccagggagttggtctgagtgacaaggaattggtttcagatgatgaagaaagaggaacgggcttggaagaaaataatcaagaagagcaaagcatggattcaaacttaggtgaagcagcatctgggtgtgagagtgaaacaagcgtctctgaagactgctcagggctatcctctcagagtgacattttaaccactcagcagagggataccatgcaacataacctgataaagctccagcaggaaatggctgaactagaagctgtgttagaacagcatgggagccagccttctaacagctacccttccatcataagtgactcttctgcccttgaggacctgcgaaatccagaacaaagcacatcagaaaaagattcgcatatacatggccaaaggaacaactccatgttttctaaaaggcctagagaacatatatcagtattaacttcacagaaaagtagtgaataccctataagccagaatccagaaggcctttctgctgacaagtttgaggtgtctgcagatagttctaccagtaaaaataaagaaccaggagtggaaaggtcatccccttctaaatgcccatcattagatgataggtggtacatgcacagttgctctgggagtcttcagaatagaaactacccatctcaagaggagctcattaaggttgttgatgtggaggagcaacagctggaagagtctgggccacacgatttgacggaaacatcttacttgccaaggcaagatctagagggaaccccttacctggaatctggaatcagcctcttctctgatgaccctgaatctgatccttctgaagacagagccccagagtcagctcgtgttggcaacataccatcttcaacctctgcattgaaagttccccaattgaaagttgcagaatctgcccagagtccagctgctgctcatactactgatactgctgggtataatgcaatggaagaaagtgtgagcagggagaagccagaattgacagcttcaacagaaagggtcaacaaaagaatgtccatggtggtgtctggcctgaccccagaagaatttatgctcgtgtacaagtttgccagaaaacaccacatcactttaactaatctaattactgaagagactactcatgttgttatgaaaacagatgctgagtttgtgtgtgaacggacactgaaatattttctaggaattgcgggaggaaaatgggtagttagctatttctgggtgacccagtctattaaagaaagaaaaatgctgaatgagcatgattttgaagtcagaggagatgtggtcaatggaagaaaccaccaaggtccaaagcgagcaagagaatcccaggacagaaagatcttcagggggctagaaatctgttgctatgggcccttcaccaacatgcccacagatcaactggaatggatggtacagctgtgtggtgcttctgtggtgaaggagctttcatcattcacccttggcacaggtgtccacccaattgtggttgtgcagccagatgcctggacagaggacaatggcttccatgcaattgggcagatgtgtgaggcacctgtggtgacccgagagtgggtgttggacagtgtagcactctaccagtgccaggagctggacacctacctgataccccagatcccccacagccactactgactgcagccagccacaggtacagagccacaggaccccaagaatgagcttacaaagtggcctttccaggccctgggagctcctctcactcttcagtccttctactgtcctggctactaaatattttatgtacatcagcctgaaaaggacttctggctatgcaagggtcccttaaagattttctgcttgaagtctcccttggaaatctgccatgagcacaaaattatggtaatttttcacctgagaagattttaaaaccatttaaacgccaccaattgagcaagatgctgattcattatttatcagccctattctttctattcaggctgttgttggcttagggctggaagcacagagtggcttggcctcaagagaatagctggtttccctaagtttacttctctaaaaccctgtgttcacaaaggcagagagtcagacccttcaatggaaggagagtgcttgggatcgattatgtgacttaaagtcagaatagtccttgggcagttctcaaatgttggagtggaacattggggaggaaattctgaggcaggtattagaaatgaaaaggaaacttgaaacctgggcatggtggctcacgcctgtaatcccagcactttgggaggccaaggtgggcagatcactggaggtcaggagttcgaaaccagcctggccaacatggtgaaaccccatctctactaaaaatacagaaattagccggtcatggtggtggacacctgtaatcccagctactcaggtggctaaggcaggagaatcacttcagcccgggaggtggaggttgcagtgagccaagatcataccacggcactccagcctgggtgacagtgagactgtggctcaaaaaaaaaaaaaaaaaaaggaaaatgaaactagaagagatttctaaaagtctgagatatatttgctagatttctaaagaatgtgttctaaaacagcagaagattttcaagaaccggtttccaaagacagtcttctaattcctcattagtaataagtaaaatgtttattgttgtagctctggtatataatccattcctcttaaaatataagacctctggcatgaatatttcatatctataaaatgacagatcccaccaggaaggaagctgttgctttctttgaggtgatttttttcctttgctccctgttgctgaaaccatacagcttcataaataattttgcttgctgaaggaagaaaaagtgtttttcataaacccattatccaggactgtttatagctgttggaaggactaggtcttccctagcccccccagtgtgcaagggcagtgaagacttgattgtacaaaatacgttttgtaaatgttgtgctgttaacactgcaaataaacttggtagcaaacacttccaaaaaaaaaaaaaaaaaa

SEQ ID NO: 99 - DNA, 7132 bp, Homo sapiens
cttagcggtagccccttggtttccgtggcaacggaaaagcgcgggaattacagataaattaaaactgcgactgcgcggcgtgagctcgctgagacttcctggacgggggacaggctgtggggtttctcagataactgggcccctgcgctcaggaggccttcaccctctgctctggttcattggaacagaaagaaatggatttatctgctcttcgcgttgaagaagtacaaaatgtcattaatgctatgcagaaaatcttagagtgtcccatctgattttgcatgctgaaacttctcaaccagaagaaagggccttcacagtgtcctttatgtaagaatgatataaccaaaaggagcctacaagaaagtacgagatttagtcaacttgttgaagagctattgaaaatcatttgtgcttttcagcttgacacaggtttggagtatgcaaacagctataattttgcaaaaaaggaaaataactctcctgaacatctaaaagatgaagtttctatcatccaaagtatgggctacagaaaccgtgccaaaagacttctacagagtgaacccgaaaatccttccttgcaggaaaccagtctcagtgtccaactctctaaccttggaactgtgagaactctgaggacaaagcagcggatacaacctcaaaagacgtctgtctacattgaattgggatctgattcttctgaagataccgttaataaggcaacttattgcagtgtgggagatcaagaattgttacaaatcacccctcaaggaaccagggatgaaatcagtttggattctgcaaaaaaggctgcttgtgaattttctgagacggatgtaacaaatactgaacatcatcaacccagtaataatgatttgaacaccactgagaagcgtgcagctgagaggcatccagaaaagtatcagggtagttctgtttcaaacttgcatgtggagccatgtggcacaaatactcatgccagctcattacagcatgagaacagcagtttattactcactaaagacagaatgaatgtagaaaaggctgaattctgtaataaaagcaaacagcctggcttagcaaggagccaacataacagatgggctggaagtaaggaaacatgtaatgataggcggactcccagcacagaaaaaaaggtagatctgaatgctgatcccctgtgtgagagaaaagaatggaataagcagaaactgccatgctcagagaatcctagagatactgaagatgttccttggataacactaaatagcagcattcagaaagttaatgagtggttttccagaagtgatgaactgttaggttctgatgactcacatgatggggagtctgaatcaaatgccaaagtagctgatgtattggacgttctaaatgaggtagatgaatattctggttcttcagagaaaatagacttactggccagtgatcctcatgaggctttaatatgtaaaagtgaaagagttcactccaaatcagtagagagtaatattgaagacaaaatatttgggaaaacctatcggaagaaggcaagcctccccaacttaagccatgtaactgaaaatctaattataggagcatttgttactgagccacagataatacaagagcgtcccctcacaaataaattaaagcgtaaaaggagacctacatcaggccttcatcctgaggattttatcaagaaagcagatttggcagttcaaaagactcctgaaatgataaatcagggaactaaccaaacggagcagaatggtcaagtgatgaatattactaatagtggtcatgagaataaaacaaaaggtgattctattcagaatgagaaaaatcctaacccaatagaatcactcgaaaaagaatctgctttcaaaacgaaagctgaacctataagcagcagtataagcaatatggaactcgaattaaatatccacaattcaaaagcacctaaaaagaataggctgaggaggaagtcttctaccaggcatattcatgcgcttgaactagtagtcagtagaaatctaagcccacctaattgtactgaattgcaaattgatagttgttctagcagtgaagagataaagaaaaaaaagtacaaccaaatgccagtcaggcacagcagaaacctacaactcatggaaggtaaagaacctgcaactggagccaagaagagtaacaagccaaatgaacagacaagtaaaagacatgacagcgatactttcccagagctgaagttaacaaatgcacctggttcttttactaagtgttcaaataccagtgaacttaaagaatttgtcaatcctagccttccaagagaagaaaaagaagagaaactagaaacagttaaagtgtctaataatgctgaagaccccaaagatctcatgttaagtggagaaagggttttgcaaactgaaagatctgtagagagtagcagtatttcattggtacctggtactgattatggcactcaggaaagtatctcgttactggaagttagcactctagggaaggcaaaaacagaaccaaataaatgtgtgagtcagtgtgcagcatttgaaaaccccaagggactaattcatggttgttccaaagataatagaaatgacacagaaggctttaagtatccattgggacatgaagttaaccacagtcgggaaacaagcatagaaatggaagaaagtgaacttgatgctcagtatttgcagaatacattcaaggtttcaaagcgccagtcatttgctccgttttcaaatccaggaaatgcagaagaggaatgtgcaacattctctgcccactctgggtccttaaagaaacaaagtccaaaagtcacttttgaatgtgaacaaaaggaagaaaatcaaggaaagaatgagtctaatatcaagcctgtacagacagttaatatcactgcaggctttcctgtggttggtcagaaagataagccagttgataatgccaaatgtagtatcaaaggaggctctaggttttgtctatcatctcagttcagaggcaacgaaactggactcattactccaaataaacatggacttttacaaaacccatatcgtataccaccactttttcccatcaagtcatttgttaaaactaaatgtaagaaaaatctgctagaggaaaactttgaggaacattcaatgtcacctgaaagagaaatgggaaatgagaacattccaagtacagtgagcacaattagccgtaataacattagagaaaatgtttttaaagaagccagctcaagcaatattaatgaagtaggttccagtactaatgaagtgggctccagtattaatgaaataggttccagtgatgaaaacattcaagcagaactaggtagaaacagagggccaaaattgaatgctatgcttagattaggggttttgcaacctgaggtctataaacaaagtcttcctggaagtaattgtaagcatcctgaaataaaaaagcaagaatatgaagaagtagttcagactgttaatacagatttctctccatatctgatttcagataacttagaacagcctatgggaagtagtcatgcatctcaggtttgttctgagacacctgatgacctgttagatgatggtgaaataaaggaagatactagttttgctgaaaatgacattaaggaaagttctgctgtttttagcaaaagcgtccagaaaggagagcttagcaggagtcctagccctttcacccatacacatttggctcagggttaccgaagaggggccaagaaattagagtcctcagaagagaacttatctagtgaggatgaagagcttccctgcttccaacacttgttatttggtaaagtaaacaatataccttctcagtctactaggcatagcaccgttgctaccgagtgtctgtctaagaacacagaggagaatttattatcattgaagaatagcttaaatgactgcagtaaccaggtaatattggcaaaggcatctcaggaacatcaccttagtgaggaaacaaaatgttctgctagcttgttttcttcacagtgcagtgaattggaagacttgactgcaaatacaaacacccaggatcctttcttgattggttcttccaaacaaatgaggcatcagtctgaaagccagggagttggtctgagtgacaaggaattggtttcagatgatgaagaaagaggaacgggcttggaagaaaataatcaagaagagcaaagcatggattcaaacttaggtgaagcagcatctgggtgtgagagtgaaacaagcgtctctgaagactgctcagggctatcctctcagagtgacattttaaccactcagcagagggataccatgcaacataacctgataaagctccagcaggaaatggctgaactagaagctgtgttagaacagcatgggagccagccttctaacagctacccttccatcataagtgactcttctgcccttgaggacctgcgaaatccagaacaaagcacatcagaaaaagcagtattaacttcacagaaaagtagtgaataccctataagccagaatccagaaggcctttctgctgacaagtttgaggtgtctgcagatagttctaccagtaaaaataaagaaccaggagtggaaaggtcatccccttctaaatgcccatcattagatgataggtggtacatgcacagttgctctgggagtcttcagaatagaaactacccatctcaagaggagctcattaaggttgttgatgtggaggagcaacagctggaagagtctgggccacacgatttgacggaaacatcttacttgccaaggcaagatctagagggaaccccttacctggaatctggaatcagcctcttctctgatgaccctgaatctgatccttctgaagacagagccccagagtcagctcgtgttggcaacataccatcttcaacctctgcattgaaagttccccaattgaaagttgcagaatctgcccagagtccagctgctgctcatactactgatactgctgggtataatgcaatggaagaaagtgtgagcagggagaagccagaattgacagcttcaacagaaagggtcaacaaaagaatgtccatggtggtgtctggcctgaccccagaagaatttatgctcgtgtacaagtttgccagaaaacaccacatcactttaactaatctaattactgaagagactactcatgttgttatgaaaacagatgctgagtttgtgtgtgaacggacactgaaatattttctaggaattgcgggaggaaaatgggtagttagctatttctgggtgacccagtctattaaagaaagaaaaatgctgaatgagcatgattttgaagtcagaggagatgtggtcaatggaagaaaccaccaaggtccaaagcgagcaagagaatcccaggacagaaagatcttcagggggctagaaatctgttgctatgggcccttcaccaacatgcccacagatcaactggaatggatggtacagctgtgtggtgcttctgtggtgaaggagctttcatcattcacccttggcacaggtgtccacccaattgtggttgtgcagccagatgcctggacagaggacaatggcttccatgcaattgggcagatgtgtgaggcacctgtggtgacccgagagtgggtgttggacagtgtagcactctaccagtgccaggagctggacacctacctgataccccagatcccccacagccactactgactgcagccagccacaggtacagagccacaggaccccaagaatgagcttacaaagtggcctttccaggccctgggagctcctctcactcttcagtccttctactgtcctggctactaaatattttatgtacatcagcctgaaaaggacttctggctatgcaagggtcccttaaagattttctgcttgaagtctcccttggaaatctgccatgagcacaaaattatggtaatttttcacctgagaagattttaaaaccatttaaacgccaccaattgagcaagatgctgattcattatttatcagccctattctttctattcaggctgttgttggcttagggctggaagcacagagtggcttggcctcaagagaatagctggtttccctaagtttacttctctaaaaccctgtgttcacaaaggcagagagtcagacccttcaatggaaggagagtgcttgggatcgattatgtgacttaaagtcagaatagtccttgggcagttctcaaatgttggagtggaacattggggaggaaattctgaggcaggtattagaaatgaaaaggaaacttgaaacctgggcatggtggctcacgcctgtaatcccagcactttgggaggccaaggtgggcagatcactggaggtcaggagttcgaaaccagcctggccaacatggtgaaaccccatctctactaaaaatacagaaattagccggtcatggtggtggacacctgtaatcccagctactcaggtggctaaggcaggagaatcacttcagcccgggaggtggaggttgcagtgagccaagatcataccacggcactccagcctgggtgacagtgagactgtggctcaaaaaaaaaaaaaaaaaaaggaaaatgaaactagaagagatttctaaaagtctgagatatatttgctagatttctaaagaatgtgttctaaaacagcagaagattttcaagaaccggtttccaaagacagtcttctaattcctcattagtaataagtaaaatgtttattgttgtagctctggtatataatccattcctcttaaaatataagacctctggcatgaatatttcatatctataaaatgacagatcccaccaggaaggaagctgttgctttctttgaggtgatttttttcctttgctccctgttgctgaaaccatacagcttcataaataattttgcttgctgaaggaagaaaaagtgtttttcataaacccattatccaggactgtttatagctgttggaaggactaggtcttccctagcccccccagtgtgcaagggcagtgaagacttgattgtacaaaatacgttttgtaaatgttgtgctgttaacactgcaaataaacttggtagcaaacacttccaaaaaaaaaaaaaaaaaa

SEQ ID NO: 100 - DNA, 3699 bp, Homo sapiens
ttcattggaacagaaagaaatggatttatctgctcttcgcgttgaagaagtacaaaatgtcattaatgctatgcagaaaatcttagagtgtcccatctgtctggagttgatcaaggaacctgtctccacaaagtgtgaccacatattttgcaaattttgcatgctgaaacttctcaaccagaagaaagggccttcacagtgtcctttatgtaagaatgatataaccaaaaggagcctacaagaaagtacgagatttagtcaacttgttgaagagctattgaaaatcatttgtgcttttcagcttgacacaggtttggagtatgcaaacagctataattttgcaaaaaaggaaaataactctcctgaacatctaaaagatgaagtttctatcatccaaagtatgggctacagaaaccgtgccaaaagacttctacagagtgaacccgaaaatccttccttgcaggaaaccagtctcagtgtccaactctctaaccttggaactgtgagaactctgaggacaaagcagcggatacaacctcaaaagacgtctgtctacattgaattgggatctgattcttctgaagataccgttaataaggcaacttattgcagtgtgggagatcaagaattgttacaaatcacccctcaaggaaccagggatgaaatcagtttggattctgcaaaaaaggctgcttgtgaattttctgagacggatgtaacaaatactgaacatcatcaacccagtaataatgatttgaacaccactgagaagcgtgcagctgagaggcatccagaaaagtatcagggtgaagcagcatctgggtgtgagagtgaaacaagcgtctctgaagactgctcagggctatcctctcagagtgacattttaaccactcagcagagggataccatgcaacataacctgataaagctccagcaggaaatggctgaactagaagctgtgttagaacagcatgggagccagccttctaacagctacccttccatcataagtgactcttctgcccttgaggacctgcgaaatccagaacaaagcacatcagaaaaagtattaacttcacagaaaagtagtgaataccctataagccagaatccagaaggcctttctgctgacaagtttgaggtgtctgcagatagttctaccagtaaaaataaagaaccaggagtggaaaggtcatccccttctaaatgcccatcattagatgataggtggtacatgcacagttgctctgggagtcttcagaatagaaactacccatctcaagaggagctcattaaggttgttgatgtggaggagcaacagctggaagagtctgggccacacgatttgacggaaacatcttacttgccaaggcaagatctagagggaaccccttacctggaatctggaatcagcctcttctctgatgaccctgaatctgatccttctgaagacagagccccagagtcagctcgtgttggcaacataccatcttcaacctctgcattgaaagttccccaattgaaagttgcagaatctgcccagagtccagctgctgctcatactactgatactgctgggtataatgcaatggaagaaagtgtgagcagggagaagccagaattgacagcttcaacagaaagggtcaacaaaagaatgtccatggtggtgtctggcctgaccccagaagaatttatgctcgtgtacaagtttgccagaaaacaccacatcactttaactaatctaattactgaagagactactcatgttgttatgaaaacagatgctgagtttgtgtgtgaacggacactgaaatattttctaggaattgcgggaggaaaatgggtagttagctatttctgggtgacccagtctattaaagaaagaaaaatgctgaatgagcatgattttgaagtcagaggagatgtggtcaatggaagaaaccaccaaggtccaaagcgagcaagagaatcccaggacagaaagatcttcagggggctagaaatctgttgctatgggcccttcaccaacatgcccacagatcaactggaatggatggtacagctgtgtggtgcttctgtggtgaaggagctttcatcattcacccttggcacaggtgtccacccaattgtggttgtgcagccagatgcctggacagaggacaatggcttccatgcaattgggcagatgtgtgaggcacctgtggtgacccgagagtgggtgttggacagtgtagcactctaccagtgccaggagctggacacctacctgataccccagatcccccacagccactactgactgcagccagccacaggtacagagccacaggaccccaagaatgagcttacaaagtggcctttccaggccctgggagctcctctcactcttcagtccttctactgtcctggctactaaatattttatgtacatcagcctgaaaaggacttctggctatgcaagggtcccttaaagattttctgcttgaagtctcccttggaaatctgccatgagcacaaaattatggtaatttttcacctgagaagattttaaaaccatttaaacgccaccaattgagcaagatgctgattcattatttatcagccctattctttctattcaggctgttgttggcttagggctggaagcacagagtggcttggcctcaagagaatagctggtttccctaagtttacttctctaaaaccctgtgttcacaaaggcagagagtcagacccttcaatggaaggagagtgcttgggatcgattatgtgacttaaagtcagaatagtccttgggcagttctcaaatgttggagtggaacattggggaggaaattctgaggcaggtattagaaatgaaaaggaaacttgaaacctgggcatggtggctcacgcctgtaatcccagcactttgggaggccaaggtgggcagatcactggaggtcaggagttcgaaaccagcctggccaacatggtgaaaccccatctctactaaaaatacagaaattagccggtcatggtggtggacacctgtaatcccagctactcaggtggctaaggcaggagaatcacttcagcccgggaggtggaggttgcagtgagccaagatcataccacggcactccagcctgggtgacagtgagactgtggctcaaaaaaaaaaaaaaaaaaaggaaaatgaaactagaagagatttctaaaagtctgagatatatttgctagatttctaaagaatgtgttctaaaacagcagaagattttcaagaaccggtttccaaagacagtcttctaattcctcattagtaataagtaaaatgtttattgttgtagctctggtatataatccattcctcttaaaatataagacctctggcatgaatatttcatatctataaaatgacagatcccaccaggaaggaagctgttgctttctttgaggtgatttttttcctttgctccctgttgctgaaaccatacagcttcataaataattttgcttgctgaaggaagaaaaagtgtttttcataaacccattatccaggactgtttatagctgttggaaggactaggtcttccctagcccccccagtgtgcaagggcagtgaagacttgattgtacaaaatacgttttgtaaatgttgtgctgttaacactgcaaataaacttggtagcaaacacttccaaaaaaaaaaaaaaaaaa

SEQ ID NO: 101 - DNA, 3800 bp, Homo sapiens
cttagcggtagccccttggtttccgtggcaacggaaaagcgcgggaattacagataaattaaaactgcgactgcgcggcgtgagctcgctgagacttcctggacgggggacaggctgtggggtttctcagataactgggcccctgcgctcaggaggccttcaccctctgctctggttcattggaacagaaagaaatggatttatctgctcttcgcgttgaagaagtacaaaatgtcattaatgctatgcagaaaatcttagagtgtcccatctgtctggagttgatcaaggaacctgtctccacaaagtgtgaccacatattttgcaaattttgcatgctgaaacttctcaaccagaagaaagggccttcacagtgtcctttatgtaagaatgatataaccaaaaggagcctacaagaaagtacgagatttagtcaacttgttgaagagctattgaaaatcatttgtgcttttcagcttgacacaggtttggagtatgcaaacagctataattttgcaaaaaaggaaaataactctcctgaacatctaaaagatgaagtttctatcatccaaagtatgggctacagaaaccgtgccaaaagacttctacagagtgaacccgaaaatccttccttgcaggaaaccagtctcagtgtccaactctctaaccttggaactgtgagaactctgaggacaaagcagcggatacaacctcaaaagacgtctgtctacattgaattgggatctgattcttctgaagataccgttaataaggcaacttattgcagtgtgggagatcaagaattgttacaaatcacccctcaaggaaccagggatgaaatcagtttggattctgcaaaaaaggctgcttgtgaattttctgagacggatgtaacaaatactgaacatcatcaacccagtaataatgatttgaacaccactgagaagcgtgcagctgagaggcatccagaaaagtatcagggtgaagcagcatctgggtgtgagagtgaaacaagcgtctctgaagactgctcagggctatcctctcagagtgacattttaaccactcagcagagggataccatgcaacataacctgataaagctccagcaggaaatggctgaactagaagctgtgttagaacagcatgggagccagccttctaacagctacccttccatcataagtgactcttctgcccttgaggacctgcgaaatccagaacaaagcacatcagaaaaagtattaacttcacagaaaagtagtgaataccctataagccagaatccagaaggcctttctgctgacaagtttgaggtgtctgcagatagttctaccagtaaaaataaagaaccaggagtggaaaggtcatccccttctaaatgcccatcattagatgataggtggtacatgcacagttgctctgggagtcttcagaatagaaactacccatctcaagaggagctcattaaggttgttgatgtggaggagcaacagctggaagagtctgggccacacgatttgacggaaacatcttacttgccaaggcaagatctagagggaaccccttacctggaatctggaatcagcctcttctctgatgaccctgaatctgatccttctgaagacagagccccagagtcagctcgtgttggcaacataccatcttcaacctctgcattgaaagttccccaattgaaagttgcagaatctgcccagagtccagctgctgctcatactactgatactgctgggtataatgcaatggaagaaagtgtgagcagggagaagccagaattgacagcttcaacagaaagggtcaacaaaagaatgtccatggtggtgtctggcctgaccccagaagaatttatgctcgtgtacaagtttgccagaaaacaccacatcactttaactaatctaattactgaagagactactcatgttgttatgaaaacagatgctgagtttgtgtgtgaacggacactgaaatattttctaggaattgcgggaggaaaatgggtagttagctatttctgggtgacccagtctattaaagaaagaaaaatgctgaatgagcatgattttgaagtcagaggagatgtggtcaatggaagaaaccaccaaggtccaaagcgagcaagagaatcccaggacagaaagatcttcagggggctagaaatctgttgctatgggcccttcaccaacatgcccacagggtgtccacccaattgtggttgtgcagccagatgcctggacagaggacaatggcttccatgcaattgggcagatgtgtgaggcacctgtggtgacccgagagtgggtgttggacagtgtagcactctaccagtgccaggagctggacacctacctgataccccagatcccccacagccactactgactgcagccagccacaggtacagagccacaggaccccaagaatgagcttacaaagtggcctttccaggccctgggagctcctctcactcttcagtccttctactgtcctggctactaaatattttatgtacatcagcctgaaaaggacttctggctatgcaagggtcccttaaagattttctgcttgaagtctcccttggaaatctgccatgagcacaaaattatggtaatttttcacctgagaagattttaaaaccatttaaacgccaccaattgagcaagatgctgattcattatttatcagccctattctttctattcaggctgttgttggcttagggctggaagcacagagtggcttggcctcaagagaatagctggtttccctaagtttacttctctaaaaccctgtgttcacaaaggcagagagtcagacccttcaatggaaggagagtgcttgggatcgattatgtgacttaaagtcagaatagtccttgggcagttctcaaatgttggagtggaacattggggaggaaattctgaggcaggtattagaaatgaaaaggaaacttgaaacctgggcatggtggctcacgcctgtaatcccagcactttgggaggccaaggtgggcagatcactggaggtcaggagttcgaaaccagcctggccaacatggtgaaaccccatctctactaaaaatacagaaattagccggtcatggtggtggacacctgtaatcccagctactcaggtggctaaggcaggagaatcacttcagcccgggaggtggaggttgcagtgagccaagatcataccacggcactccagcctgggtgacagtgagactgtggctcaaaaaaaaaaaaaaaaaaaggaaaatgaaactagaagagatttctaaaagtctgagatatatttgctagatttctaaagaatgtgttctaaaacagcagaagattttcaagaaccggtttccaaagacagtcttctaattcctcattagtaataagtaaaatgtttattgttgtagctctggtatataatccattcctcttaaaatataagacctctggcatgaatatttcatatctataaaatgacagatcccaccaggaaggaagctgttgctttctttgaggtgatttttttcctttgctccctgttgctgaaaccatacagcttcataaataattttgcttgctgaaggaagaaaaagtgtttttcataaacccattatccaggactgtttatagctgttggaaggactaggtcttccctagcccccccagtgtgcaagggcagtgaagacttgattgtacaaaatacgttttgtaaatgttgtgctgttaacactgcaaataaacttggtagcaaacacttccaaaaaaaaaaaaaaaaaa

SEQ ID NO: 102 - DNA, 1500 bp, Homo sapiens
ccacccctagctaacccaggctgcttccttaccagcttcccgccccctggggaggcggcaatgcaaagaccgtccgctgccagctctgccgctatctctgtggggtgaatctaacatggcggacaaagacagtaactagtcccgtttctccgcgttttcgccaagaagattggctcttaccacttgtccctcaaaacgaccaccccattgactggtggcgattgcgtcgacggagacggggcaaaagcaagctgaacccgaaaaataacaaacactggggctgaggggtggaactacgagtgcgcagacatgggccagagcgcatttcccctgccccaggcaaattcggcgctcactgcgtccccgcaggccactgaccttacaagactacttgccccagactcctggggctggatgggaattgtagtctccctaaagagttgtacgtatctttttaaggcctagtttctgctttcaaaatacgaaaacataacactccagtccataactgttgacaagtacaagcgcgcacaggtctccaatctatccactggatttccgtgagaattgtgcccgctctggtattggatgttcctctccataagactacagtttctaaggaacactgtggcgaagacctttcattccgcaacgcatgctggaaataattatttccctccacccccccaacaatccttattacttatatttaccgaaactggagacctccattagggcggaaagagtgggggattgggacctcttcttacgactgctttggacaataggtagcgattctgaccttcgtacagcaattactgtgatgcaataagccgcaactggaagagtagaggctagagggcaggcactttatggcaaactcaggtagaattcttcctcttccgtctctttccttttacgtcatccgggggcagactgggtggccaatccagagccccgagagacgcttggctctttctgtccctcccatcctctgattgtaccttgatttcgtattctgagaggctgctgcttagcggtagccccttggtttccgtggcaacggaaaagcgcgggaattacagataaattaaaactgcgactgcgcggcgtgagctcgctgagacttcctggacgggggacaggctgtggggtttctcagataactgggcccctgcgctcaggaggccttcaccctctgctctgggtaaaggtagtagagtcccgggaaagggacagggggcccaagtgatgctctggggtactggcgtgggagagtggatttccgaagctgacagatgggtattctttgacggggggtaggggcggaacctgagaggcgtaaggcgttgtgaaccctggggaggggggcagtttgtaggtcgcgagggaagcgctgaggatcaggaagggggcactgagtgtccgtgggggaatcctcgtgataggaactggaatatgccttgagggggacactatgtctttaaaaacgtcggctgg

SEQ ID NO: 103 - DNA, 1213 bp, Homo sapiens
gtccataactgttgacaagtacaagcgcgcacaggtctccaatctatccactggatttccgtgagaattgtgcccgctctggtattggatgttcctctccataagactacagtttctaaggaacactgtggcgaagacctttcattccgcaacgcatgctggaaataattatttccctccacccccccaacaatccttattacttatatttaccgaaactggagacctccattagggcggaaagagtgggggattgggacctcttcttacgactgctttggacaataggtagcgattctgaccttcgtacagcaattactgtgatgcaataagccgcaactggaagagtagaggctagagggcaggcactttatggcaaactcaggtagaattcttcctcttccgtctctttccttttacgtcatccgggggcagactgggtggccaatccagagccccgagagacgcttggctctttctgtccctcccatcctctgattgtaccttgatttcgtattctgagaggctgctgcttagcggtagccccttggtttccgtggcaacggaaaagcgcgggaattacagataaattaaaactgcgactgcgcggcgtgagctcgctgagacttcctggacgggggacaggctgtggggtttctcagataactgggcccctgcgctcaggaggccttcaccctctgctctgggtaaaggtagtagagtcccgggaaagggacagggggcccaagtgatgctctggggtactggcgtgggagagtggatttccgaagctgacagatgggtattctttgacggggggtaggggcggaacctgagaggcgtaaggcgttgtgaaccctggggaggggggcagtttgtaggtcgcgagggaagcgctgaggatcaggaagggggcactgagtgtccgtgggggaatcctcgtgataggaactggaatatgccttgagggggacactatgtctttaaaaacgtcggctggtcatgaggtcaggagttccagaccagcctgaccaacgtggtgaaactccgtctctactaaaaatacaaaaattagccgggcgtggtgccgctccagctactcaggaggctgaggcaggagaatcgctagaacccgggaggcggaggttgcagtgagccgagatcgcgccattgcactccagcctgggcgacagagcgagactgtctcaaaaca

SEQ ID NO: 104 - DNA, 1099 bp, Homo sapiens
aaagcgcaagagggaagtagaggagcgtcagtagtaacagatgctgccggcagggatgtgcttgaggaggatccagagatgagagcaggtcactgggaaaggttaggggcggggaggccttgattggtgttggtttggtcgttgttgattttggttttatgcaagaaaaagaaaacaaccagaaacattggagaaagctaaggctaccaccacctacccggtcagtcactcctctgtagctttctctttcttggagaaaggaaaagacccaaggggttggcagcaatatgtgaaaaaattcagaatttatgttgtctaattacaaaaagcaacttctagaatctttaaaaataaaggacgttgtcattagttctttggtttgtattattctaaaaccttccaaatcttaaatttactttattttaaaatgataaaatgaagttgtcattttataaaccttttaaaaagatatatatatatgtttttctaatgtgttaaagttcattggaacagaaagaaatggatttatctgctcttcgcgttgaagaagtacaaaatgtcattaatgctatgcagaaaatcttagagtgtcccatctggtaagtcagcacaagagtgtattaatttgggattcctatgattatctcctatgcaaatgaacagaattgaccttacatactagggaagaaaagacatgtctagtaagattaggctattgtaattgctgattttcttaactgaagaactttaaaaatatagaaaatgattccttgttctccatccactctgcctctcccactcctctccttttcaacacaaatcctgtggtccgggaaagacagggactctgtcttgattggttctgcactggggcaggaatctagtttagattaactggcattttggcttttcttccagctctaaaacaagctccatcacttgaaatggcaaaataaaatcatggatgaggccgagggcggtggcttatgcctgtaatcccagcactttgggaggccaaggtggtaggatcacgaggtcaggagatcgagaccatcctggccaacatggtgaaaccccctctccactaaaaatacaaaaa

SEQ ID NO: 105 - DNA, 1054 bp, Homo sapiens
cattttattattttatttacttgaaattttgaaatacttgaaattttccatattaagttaaaaaggcatttacagtaaacaaaaaaaagttctaggaaggaattcaaaagaaatataagcagaaaattttgtctttatggagcttaaagatgagatgtgcacccacagtgatagtgcagaaaaatatatcactggaaatgaattcgtacgaactattatcaactaatcttttaaatgctgatgatagtatagagtattgaagggatcaatataattctgttttgatatctgaaagctcactgaaggtaaggatcgtattctctgctgtattctcagttcctgacacagcagacatttaataaatattgaacgaacttgaggccttatgttgactcagtcataacagctcaaagttgaacttattcactaagaatagctttatttttaaataaattattgagcctcatttattttctttttctccccccctaccctgctagtctggagttgatcaaggaacctgtctccacaaagtgtgaccacatattttgcaagtaagtttgaatgtgttatgtggctccattattagcttttgtttttgtccttcataacccaggaaacacctaactttatagaagctttactttcttcaattaagtgagaacgaaaaatccaactccatttcattctttctcagagagtatatagttatcaaaagttggttgtaatcatagttcctggtaaagttttgacatatattatctttttttttttttttgagacaaagtctcgctctgtcgcccaggctggagtgcagtggcatgatcttggctcactgcaacctccgccccccgagttcaagcgattcttctacctcagcctcccaggtagctgggactacaggcacccgccaccatgcttggctaatttttgtacttttagtagagataaggtttcaccatattggccaggctggtctcgaactcctgaccttgtgatccacctgcctcggcctcccaaagttctgggattacaggcgtgagccaccacaccc

SEQ ID NO: 106 - DNA, 1078 bp, Homo sapiens
cgcttgatcacagatgtatgtatgagtttatttctgtactgtcaattccattttattgatgtatgtgtctattcttatgctattaccacactttcttgattactatagctttgtggtgaggtgttgagattttaaactaattataagcatcttacatgaactacttaccgtttatatttgattatgcagcatgaaataattatgaatatatcattaaatatgccatattaacttttattaagttttatgtgatcataacagtaagccatatgcatgtaagttcagttttcatagatcattgcttatgtagtttaggtttttgcttatgcagcatccaaaaacaattaggaaactattgcttgtaattcacctgccattactttttaaatggctcttaagggcagttgtgagattatcttttcatggctatttgccttttgagtattctttctacaaaaggaagtaaattaaattgttctttctttctttataatttatagattttgcatgctgaaacttctcaaccagaagaaagggccttcacagtgtcctttatgtaagaatgatataaccaaaaggtatataatttggtaatgatgctaggttggaagcaaccacagtaggaaaaagtagaaattatttaataacatagcgttcctataaaaccattcatcagaaaaatttataaaagagtttttagcacacagtaaattatttccaaagttattttcctgaaagttttatgggacatctgccttatacaggtattagaaacttactgcctttctctaatgcttctagtgtaaaaacttgcagacttatgtaaagtagggctgtatcgccgtgcccccattgtctgttaatcttgtttttatatttttgattgtgtttccttttctttttttttttttttttaagacagggtcctgctctgtcactgaggctggagtgcagtggcgtgatctcggctcactgtagcctctgtctcccagcctcttcctgccttagcctcccaaatagctgggactacaggcacacgctaccatgcccggccaatttttgtattttttgtagagat

SEQ ID NO: 107 - DNA, 1089 bp, Homo sapiens
tcagcctgggcaacatagtgagaccccatcactaccaacaaaataaataaataaatgtacatggtggcatatgcccatagtcctagctacttgggaggctatagtgggaggatagcttgagtacagaagtctgaggctgcagtgagctatgattgtggcactgcatgctagcctgggcaatagagcaagaccctgtctctaaattaaacaaaaaaaaaagtactctagttttctatgcaatgcattatatctgctgtggatttagggcagtattatatcagataattttaggcatttggtaggcttaaatgaatgacaaaaagttactaaatcactgccatcacacggtttatacagatgtcaatgatgtattgattatagaggttttctactgttgctgcatcttatttttatttgtttacatgtcttttcttattttagtgtccttaaaaggttgataatcacttgctgagtgtgtttctcaaacaatttaatttcaggagcctacaagaaagtacgagatttagtcaacttgttgaagagctattgaaaatcatttgtgcttttcagcttgacacaggtttggagtgtaagtgttgaatatcccaagaatgacactcaagtgctgtccatgaaaactcaggaagtttgcacaattactttctatgacgtggtgataagaccttttagtctaggttaattttagttctgtatctgtaatctatttttaaaaaattactcccactggtctcacaccttattttatcaatcgtaaggtgcacatttttcacatcttaacatctctgaaattgggaacattttactattgagggtgtgtcatttgtttaatttgtgtgctttctttcttagtgatacagaaaataatagtgcaacttacattgttggtgtcttagctttagtgaaatacagtattgataggcaaatttcttagtgttaaggtagaaaacaaggactctaaataactttgatggtctgtgtatttgtttttgtttcctaggagtaaaatttccagttgattttttaaaatttgatttttaaaaaaaatcacaggtaaccttaatgcattgt

SEQ ID NO: 108 - DNA, 1140 bp, Homo sapiens
gttaattttagttctgtatctgtaatctatttttaaaaaattactcccactggtctcacaccttattttatcaatcgtaaggtgcacatttttcacatcttaacatctctgaaattgggaacattttactattgagggtgtgtcatttgtttaatttgtgtgctttctttcttagtgatacagaaaataatagtgcaacttacattgttggtgtcttagctttagtgaaatacagtattgataggcaaatttcttagtgttaaggtagaaaacaaggactctaaataactttgatggtctgtgtatttgtttttgtttcctaggagtaaaatttccagttgattttttaaaatttgatttttaaaaaaaatcacaggtaaccttaatgcattgtcttaacacaacaaagagcatacatagggtttctcttggtttctttgattataattcatacatttttctctaactgcaaacataatgttttcccttgtattttacagatgcaaacagctataattttgcaaaaaaggaaaataactctcctgaacatctaaaagatgaagtttctatcatccaaagtatgggctacagaaaccgtgccaaaagacttctacagagtgaacccgaaaatccttccttggtaaaaccatttgttttcttcttcttcttcttcttcttttcttttttttttcttttttttttttgagatggagtcttgctctgtggcccaggctagaagcagtcctcctgccttagcccccttagtagctgggattacaggcacgcgccaccatgccaggctaatttttgtatttttagtagagacggggtttcatcatgttggccaggctggtctcgaactcctaacctcaggtgatccacccacctcggctccccaaattgctgggattacaggtgtgagccactgtgcccggccggtaaaaccattttcatttattctggcaacatctctttattgagcattgtgaatatgttagtgaatgtgctagatgctcatagatttatataaaaagttagtgaagaaggaaagatggtatattaagtggttagacaagtgttctaatcagttagagttcagagaaggtcagggtacctgatataatcaagagagagacctta

SEQ ID NO: 109 - DNA, 1106 bp, Homo sapiens
gacagagcaggactctgtacaccccccaaaacaaaaaaaaaagttatcagatgtgattggaatgtatatcaagtatcagcttcaaaatatgctatattaatacttcaaaaattacacaaataatacataatcaggtttgaaaaatttaagacaacagaaaaaaaaattcaaatcacacatatcccacacattttattattactactactattattttgtagagactgggtctcactctgttgcttatgctggtcttgaactcctggcctcaagcagtcctgctccagcctcccaaagtgctgggattataggcatgagctaccgctcccagccccagacattttagtgtgtaaattcctgggcattttttccaggcatcatacatgttagctgactgatgatggtcaatttattttgtccatggtgtcaagtttctcttcaggaggaaaagcacagaactggccaacaattgcttgactgttctttaccatactgtttagcaggaaaccagtctcagtgtccaactctctaaccttggaactgtgagaactctgaggacaaagcagcggatacaacctcaaaagacgtctgtctacattgaattgggtaagggtctcaggttttttaagtatttaataataattgctggattccttatcttatagttttgccaaaaatcttggtcataatttgtatttgtggtaggcagctttgggaagtgaattttatgagccctatggtgagttataaaaaatgtaaaagacgcagttcccaccttgaagaatcttactttaaaaagggagcaaaagaggccaggcatggtggctcacacctgtaatcccagcactttgggaggccaaagtgggtggatcacctgaggtcgggagttcgagaccagcctagccaacatggagaaactctgtctgtaccaaaaaataaaaaattagccaggtgtggtggcacataactgtaatcccagctactcgggaggctgaggcaggagaatcacttgaacccgggaggtggaggttgcggtgaaccgagatcgcaccattgcactccagcctgggcaaaaatagcgaaactccatctaaaaaaaaaaaaga

SEQ ID NO: 110 - DNA, 1046 bp, Homo sapiens
tgtataactcattagatgcttgtcagacctctgagattgttcctattatacttattttacagatgagaaaattaaggcacagagaagttatgaaatttttccaaggtattaaacctagtaagtggctgagccatgattcaaacctaggaagttagatgtcagagcctgtgctttttttttgtttttgtttttgttttcagtagaaacgggggtctcactttgttggccaggctggtcttgaactcctaacctcaaataatccacccatctcggcctcctcaagtgctgggattacaggtgagagccactgtgcctggcgaagcccatgcctttaaccacttctctgtattacatactagcttaactagcattgtacctgccacagtagatgctcagtaaatatttctagttgaatatctgtttttcaacaagtacatttttttaacccttttaattaagaaaacttttattgatttattttttggggggaaattttttaggatctgattcttctgaagataccgttaataaggcaacttattgcaggtgagtcaaagagaacctttgtctatgaagctggtattttcctatttagttaatattaaggattgatgtttctctctttttaaaaatattttaacttttattttaggttcagggatgtatgtgcagtttgttatataggtaaacacacgacttgggatttggtgtatagatttttttcatcatccgggtactaagcataccccacagttttttgtttgctttctttctgaatttctccctcttcccaccttcctccctcaagtaggctggtgtttctccagactagaatcatggtattggaagaaaccttagagatcatctagtttagttctctcattttatagtggaggaaataccctttttgtttgttggatttagttattagcactgtccaaaggaatttaggataacagtagaactctgcacatgcttgcttctagcagattgttctctaagttcctcatatacagtaatattgacacagcagtaattgtgactga

SEQ ID NO: 111 - DNA, 1077 bp, Homo sapiens
ttgaccattccatttctttctttctctcttttttttttttttttttgagacagagtcttgctctgttgcccaggctggagtacagaggtgtgatctcacctctccgcaacgtctgcctcccaggttgaagccatactcctgcctcagcctctctagtagctgggactacaggcgcgcgccaccacacccggctaatttttgtatttttagtagagatggggtttcaccatgttggccaggctggtcttgaactcatgacctcaagtggtccacccgcctcagcctcccaaagtgctggaattacaggcttgagccaccgtgcccagcaaccatttcatttcaactagaagtttctaaaggagagagcagctttcactaactaaataagattggtcagctttctgtaatcgaaagagctaaaatgtttgatcttggtcatttgacagttctgcatacatgtaactagtgtttcttattaggactctgtcttttccctatagtgtgggagatcaagaattgttacaaatcacccctcaaggaaccagggatgaaatcagtttggattctgcaaaaaagggtaatggcaaagtttgccaacttaacaggcactgaaaagagagtgggtagatacagtactgtaattagattattctgaagaccatttgggacctttacaacccacaaaatctcttggcagagttagagtatcattctctgtcaaatgtcgtggtatggtctgatagatttaaatggtactagactaatgtacctataataagaccttctgtaactgattgttgccctttcgtttttttttttgtttgtttgtttgtttttttttgagatggggtctcactctgttgcccaggctggagtgcagtgatgcaatcttggctcactgcaacctccacctccaaggctcaagctatcctcccacttcagcctcctgagtagctgggactacaggcgcatgccaccacacccggttaattttttgtggttttatagagatggggtttcaccatgttaccgaggctggtctcaaactcctggactcaagcagtctgcccacttcag

SEQ ID NO: 112 - DNA, 4426 bp, Homo sapiens
gtctgcccacttcagcctcccaaagtgctgcagttacaggcttgagccactgtgcctggcctgccctttacttttaattggtgtatttgtgtttcatcttttacctactggtttttaaatatagggagtggtaagtctgtagatagaacagagtattaagtagacttaatggccagtaatctttagagtacatcagaaccagttttctgatggccaatctgcttttaattcactcttagacgttagagaaataggtgtggtttctgcatagggaaaattctgaaattaaaaatttaatggatcctaagtggaaataatctaggtaaataggaattaaatgaaagagtatgagctacatcttcagtatacttggtagtttatgaggttagtttctctaatatagccagttggttgatttccacctccaaggtgtatgaagtatgtatttttttaatgacaattcagtttttgagtaccttgttatttttgtatattttcagctgcttgtgaattttctgagacggatgtaacaaatactgaacatcatcaacccagtaataatgatttgaacaccactgagaagcgtgcagctgagaggcatccagaaaagtatcagggtagttctgtttcaaacttgcatgtggagccatgtggcacaaatactcatgccagctcattacagcatgagaacagcagtttattactcactaaagacagaatgaatgtagaaaaggctgaattctgtaataaaagcaaacagcctggcttagcaaggagccaacataacagatgggctggaagtaaggaaacatgtaatgataggcggactcccagcacagaaaaaaaggtagatctgaatgctgatcccctgtgtgagagaaaagaatggaataagcagaaactgccatgctcagagaatcctagagatactgaagatgttccttggataacactaaatagcagcattcagaaagttaatgagtggttttccagaagtgatgaactgttaggttctgatgactcacatgatggggagtctgaatcaaatgccaaagtagctgatgtattggacgttctaaatgaggtagatgaatattctggttcttcagagaaaatagacttactggccagtgatcctcatgaggctttaatatgtaaaagtgaaagagttcactccaaatcagtagagagtaatattgaagacaaaatatttgggaaaacctatcggaagaaggcaagcctccccaacttaagccatgtaactgaaaatctaattataggagcatttgttactgagccacagataatacaagagcgtcccctcacaaataaattaaagcgtaaaaggagacctacatcaggccttcatcctgaggattttatcaagaaagcagatttggcagttcaaaagactcctgaaatgataaatcagggaactaaccaaacggagcagaatggtcaagtgatgaatattactaatagtggtcatgagaataaaacaaaaggtgattctattcagaatgagaaaaatcctaacccaatagaatcactcgaaaaagaatctgctttcaaaacgaaagctgaacctataagcagcagtataagcaatatggaactcgaattaaatatccacaattcaaaagcacctaaaaagaataggctgaggaggaagtcttctaccaggcatattcatgcgcttgaactagtagtcagtagaaatctaagcccacctaattgtactgaattgcaaattgatagttgttctagcagtgaagagataaagaaaaaaaagtacaaccaaatgccagtcaggcacagcagaaacctacaactcatggaaggtaaagaacctgcaactggagccaagaagagtaacaagccaaatgaacagacaagtaaaagacatgacagcgatactttcccagagctgaagttaacaaatgcacctggttcttttactaagtgttcaaataccagtgaacttaaagaatttgtcaatcctagccttccaagagaagaaaaagaagagaaactagaaacagttaaagtgtctaataatgctgaagaccccaaagatctcatgttaagtggagaaagggttttgcaaactgaaagatctgtagagagtagcagtatttcattggtacctggtactgattatggcactcaggaaagtatctcgttactggaagttagcactctagggaaggcaaaaacagaaccaaataaatgtgtgagtcagtgtgcagcatttgaaaaccccaagggactaattcatggttgttccaaagataatagaaatgacacagaaggctttaagtatccattgggacatgaagttaaccacagtcgggaaacaagcatagaaatggaagaaagtgaacttgatgctcagtatttgcagaatacattcaaggtttcaaagcgccagtcatttgctccgttttcaaatccaggaaatgcagaagaggaatgtgcaacattctctgcccactctgggtccttaaagaaacaaagtccaaaagtcacttttgaatgtgaacaaaaggaagaaaatcaaggaaagaatgagtctaatatcaagcctgtacagacagttaatatcactgcaggctttcctgtggttggtcagaaagataagccagttgataatgccaaatgtagtatcaaaggaggctctaggttttgtctatcatctcagttcagaggcaacgaaactggactcattactccaaataaacatggacttttacaaaacccatatcgtataccaccactttttcccatcaagtcatttgttaaaactaaatgtaagaaaaatctgctagaggaaaactttgaggaacattcaatgtcacctgaaagagaaatgggaaatgagaacattccaagtacagtgagcacaattagccgtaataacattagagaaaatgtttttaaagaagccagctcaagcaatattaatgaagtaggttccagtactaatgaagtgggctccagtattaatgaaataggttccagtgatgaaaacattcaagcagaactaggtagaaacagagggccaaaattgaatgctatgcttagattaggggttttgcaacctgaggtctataaacaaagtcttcctggaagtaattgtaagcatcctgaaataaaaaagcaagaatatgaagaagtagttcagactgttaatacagatttctctccatatctgatttcagataacttagaacagcctatgggaagtagtcatgcatctcaggtttgttctgagacacctgatgacctgttagatgatggtgaaataaaggaagatactagttttgctgaaaatgacattaaggaaagttctgctgtttttagcaaaagcgtccagaaaggagagcttagcaggagtcctagccctttcacccatacacatttggctcagggttaccgaagaggggccaagaaattagagtcctcagaagagaacttatctagtgaggatgaagagcttccctgcttccaacacttgttatttggtaaagtaaacaatataccttctcagtctactaggcatagcaccgttgctaccgagtgtctgtctaagaacacagaggagaatttattatcattgaagaatagcttaaatgactgcagtaaccaggtaatattggcaaaggcatctcaggaacatcaccttagtgaggaaacaaaatgttctgctagcttgttttcttcacagtgcagtgaattggaagacttgactgcaaatacaaacacccaggatcctttcttgattggttcttccaaacaaatgaggcatcagtctgaaagccagggagttggtctgagtgacaaggaattggtttcagatgatgaagaaagaggaacgggcttggaagaaaataatcaagaagagcaaagcatggattcaaacttaggtattggaaccaggtttttgtgtttgccccagtctatttatagaagtgagctaaatgtttatgcttttggggagcacattttacaaatttccaagtatagttaaaggaactgcttcttaaacttgaaacatgttcctcctaaggtgcttttcatagaaaaaagtccttcacacagctaggacgtcatctttgactgaatgagctttaacatcctaattactggtggacttacttctggtttcattttataaaagcaaatccaggtgtcccaaagcaaggaatttaatcattttgtgtgacatgaaagtaaatccagtcctgccaatgagaagaaaaagacacagcaagttgcagcgtttatagtctgcttttacatctgaacctctgtttttgttatttaaggtgaagcagcatctgggtgtgagagtgaaacaagcgtctctgaagactgctcagggctatcctctcagagtgacattttaaccactcaggtaaaaagc

SEQ ID NO: 113 - DNA, 1089 bp, Homo sapiens
tggtctgagtgacaaggaattggtttcagatgatgaagaaagaggaacgggcttggaagaaaataatcaagaagagcaaagcatggattcaaacttaggtattggaaccaggtttttgtgtttgccccagtctatttatagaagtgagctaaatgtttatgcttttggggagcacattttacaaatttccaagtatagttaaaggaactgcttcttaaacttgaaacatgttcctcctaaggtgcttttcatagaaaaaagtccttcacacagctaggacgtcatctttgactgaatgagctttaacatcctaattactggtggacttacttctggtttcattttataaaagcaaatccaggtgtcccaaagcaaggaatttaatcattttgtgtgacatgaaagtaaatccagtcctgccaatgagaagaaaaagacacagcaagttgcagcgtttatagtctgcttttacatctgaacctctgtttttgttatttaaggtgaagcagcatctgggtgtgagagtgaaacaagcgtctctgaagactgctcagggctatcctctcagagtgacattttaaccactcaggtaaaaagcgtgtgtgtgtgtgcacatgcgtgtgtgtggtgtcctttgcattcagtagtatgtatcccacattcttaggtttgctgacatcatctctttgaattaatggcacaattgtttgtggttcattgtctccttaaattagactgtaagcaccttgatggaactcatactaccttttatttcacacacacgcacacgcgcacacacagcctacacatacactgcctagctcattgtagcatactaaatactgattttaatgaataagctaaaccttcgaaacccatttgctaatcccagcactttgggaggccaaggtgggtggatcacctcaggtcagaagtttgagaccagcctggccaacatggtgaaaccccacatctactaaaaatacaaaaattagctgggcgtggtggccaatgccttgtaatcccagctattctggaggctgagacaggagaatcgcctgaacctgggaggcggaggttgcactgagc

SEQ ID NO: 114 - DNA, 1172 bp, Homo sapiens
ttgttgtatttttataaaatgccatagatagagggcttttttcaacattacatcagtctaaaaatcacacatttttatatgaactaacctaaatgtctgatgaatctcacaacaccaagtctttgaaatgtgcccatataaataaaatgttaacagattcatgctaattttaaatatcgatagtgtttaaatgccttaattattttttcactccctagctttaaaagaaaataaccaacttcaaaaggacatcacaataacatcaagtctatttgggggaatttgaggattttttccctcactaacatcatttggaaataatttcatgggcattaattgcatgaatgtggttagattaaaaggtgttcagctagaacttgtagttccatactaggtgatttcaattcctgtgctaaaattaatttgtatgatatattttcatttaatggaaagcttctcaaagtatttcattttcttggtgccatttatcgtttttgaagcagagggataccatgcaacataacctgataaagctccagcaggaaatggctgaactagaagctgtgttagaacagcatgggagccagccttctaacagctacccttccatcataagtgactcttctgcccttgaggacctgcgaaatccagaacaaagcacatcagaaaaaggtgtgtattgttggccaaacactgatatcttaagcaaaattctttccttcccctttatctccttctgaagagtaaggacctagctccaacattttatgatccttgctcagcacatgggtaattatggagccttggttcttgtccctgctcacaactaatataccagtcagagggacccaaggcagtcattcatgttgtcatctgagtacctacaacaagtagatgctatggggagcccatggaagatacatggtatacaacatagctcttgctctattggaagctaagtggaatgggagaaattggtgacaggcaaccccataatttcagaaagctatgaaaaagtactcagacatattccttataacactggtgtcacatcacaaagacctatttaatgtgcttctgatttatagggagagacatcctatacttcaggaactgcactttgatccacagaaagcctagtgatgtagagctcctgttagttcaaaaggaaa

SEQ ID NO: 115 - DNA, 1066 bp, Homo sapiens
cattgcatgaggcccattgtagtaagaagaggaatttatatgctaaatgttctggtgatagaatgacttttctttttttttacagtccaaaggtcttttttttttttttttaacacctattatgccatgaattcatagggaataggttccagctgctcaggctccttcccattggttctcacaaagtgtgcttctctgggtggagcaggctggtgcttcagttgaacccacgtacctttctctttggcttctttctttttctgatcattttccttcacgcgtttcaggaagctgtcttggctcttagagtgtttaatgtgctcaatacgcacattaattctcttggcaagaatcttgcccttaacttgtttacagcgatgccaacagcatgctgggtcacgttgtagacttttccagttttgccatggtaacacttgtggggcattcctttttgaacagtacccgttcccttgatgtctacaatttcacctttcttacagattcgcatatacatggccaaaggaacaactccatgttttctaaaaggcctagagaacatatatcaggtgcctctcctctttccctttgtgttcgtcattttggcaaattactgaaagatggtggttctggccaaaaggaggaatgactttttaatagctgtgtttgtatctgagccttccctctgcctttcattttttttgttttgttttgttttgtttttgtttgagatgaagtttcacttttgttgcccaggctggagtgcaatggtgtgatttcggctcattacaatgtccgcctcagcctcctgggtagctgggattacaggcacccgccaccacgcccagctaatttttgtatttttagtagagacagggtttcaccatgttggccgggctggtctcaaactcctgacctcaggtgatctgtccacctcggcctctcaaagtgctgggattgtaggcgtgagccacatcacctggccacttttttaactctttccaatggttaattccgtttgatatggttccttggaacttgcacattaccctttatcaattatcaccct

SEQ ID NO: 116 - DNA, 1124 bp, Homo sapiens
ctcatgtcttgtttacccccgacatgcagaagctgaaatccccatttcatacagtcttcaatgtggaggcagtagggatggagaaaataatgtactttgtgctctccggtactctttctttcctattgtctgaggggatttgggcataatttattttgctgcagagataaaaatttgttatatatattttttatcattcagggccaaggaatatagattttttttttcagccttgtctcagctgggtgtctttatttactctgtcttaaagtgttccttttattatcattattattttttaatcattgaattccatttggtgctagcatctgtctgttgcattgcttgtgtttataaaattctgcctgatatacttgtttaaaaaccaatttgtgtatcatagattgatgcttttgaaaaaaatcagtattctaacctgaattatcactatcagaacaaagcagtaaagtagatttgttttctcattccatttaaagcagtattaacttcacagaaaagtagtgaataccctataagccagaatccagaaggcctttctgctgacaagtttgaggtgtctgcagatagttctaccagtaaaaataaagaaccaggagtggaaaggtaagaaacatcaatgtaaagatgctgtggtatctgacatctttatttatattgaactctgattgttaatttttttcaccatactttctccagttttttgcatacaggcatttatacacttttattgctctaggatacttcttttgtttaatcctatataggttttttgaacctataacataagctacaacatgagaaatgtgcggttagatagatatgtcccttctgaaggtcagaaaaaaatataatggaggtaaaacctgaacaagcttggaaactgatggtagacttcttcaaggcagcccttgccctaattaaaattcttgtctttctagaaaaagtctagctgttgatttaccacagaaaataataataataattactattattattattttttgagacagggtcgccctgtgtcacctagattgcagtggtgcagtcatggctcactgcatcctccgtttttcaggctcaagcaatcctcccaccttagcctc

SEQ ID NO: 117 - DNA, 1191 bp, Homo sapiens
tctttcctttctttcctttcttcctttctttccttcctcccttccttttcttttctttctttcctttccttttctttcctttctttcctttcctttctttcttgacagagtcttgctctgtcactcaggctggagtgcagtggcgtgatctcggctcactgcaacctctgtctcccaggttcaagcaattttcctgcctcagcctcccgagtagctgagattacaggcgccagccaccacacccagctactgacctgcttttaaacagctgggagatatggtgcctcagaccaacccaaccccatgttatatgtcaaccctgacatattggcaggcaacatgaatccagacttctaggctgtcttgcgggctcttttttgccagtcatttctgatctctctgacatgagctgtttcatttatgctttggctgcccagcaagtatgatttgtcctttcacaattggtggcgatggttttctccttccatttatctttctaggtcatccccttctaaatgcccatcattagatgataggtggtacatgcacagttgctctgggagtcttcagaatagaaactacccatctcaagaggagctcattaaggttgttgatgtggaggagcaacagctggaagagtctgggccacacgatttgacggaaacatcttacttgccaaggcaagatctaggtaatatttcatctgctgtattggaacaaacactttgattttactctgaatcctacataaagatattctggttaaccaacttttagatgtactagtctatcatggacacttttgttatacttaattaagcccactttagaaaaatagctcaagtgttaatcaaggtttacttgaaaattattgaaactgttaatccatctatattttaattaatggtttaactaatgattttgaggatgagggagtcttggtgtactctaaatgtattatttcaggccaggcatagtggctcacgcctgtaatcccagtactccaggaggccgaggcaggtggatcagctgaggtcaggagttcaagacctgtctggccaacatggtgaaaccctgtctctactaaaaatacaaaaaaattaactgggtgtgctagtgcatgcccgtaatcctagctactctggaggctgaggcagcagaatcacttgaacccgggaggcggaggttgcg

SEQ ID NO: 118 - DNA, 1311 bp, Homo sapiens
agccaccgtgctcggcccataaacttttatttttaaaataatgtcatgataaataatattgcttaggtgtctttaatatattagtaacatttctgttttattgtacatcaacatttatattcaaattaatgggtgaagagtactccattggactaggtatatcgtaatttaatctcctattattggacaactacattgtttctaaaattatactattcctatgactaaacctttgcatatatcttttatctccctaggatatatttctaaaactagcattgttgactgaaagtgtaaatacgtgttaaggtgtttgctacataatgccatatttcctttttaggaaactaagctactttggatttccaccaacactgtattcatgtacccatttttctcttaacctaactttattggtctttttaattcttaacagagaccagaactttgtaattcaacattcatcgttgtgtaaattaaacttctcccattcctttcagagggaaccccttacctggaatctggaatcagcctcttctctgatgaccctgaatctgatccttctgaagacagagccccagagtcagctcgtgttggcaacataccatcttcaacctctgcattgaaagttccccaattgaaagttgcagaatctgcccagagtccagctgctgctcatactactgatactgctgggtataatgcaatggaagaaagtgtgagcagggagaagccagaattgacagcttcaacagaaagggtcaacaaaagaatgtccatggtggtgtctggcctgaccccagaagaatttgtgagtgtatccatatgtatctccctaatgactaagacttaacaacattctggaaagagttttatgtaggtattgtcaattaataacctagaggaagaaatctagaaaacaatcacagttctgtgtaatttaatttcgattactaatttctgaaaatttagatctagataaagctatagtgtggattattttatgtatatttacttgagaaaataattattaaatattagtggaaaagctatactttgggtatgatataggactttcgaattggaattttcctttctatctgtaaaagcaagtaggtatagttttattccccagaaggcatctttttctcccccttgtctcacatgggtgaatttaccagcatatttaactaaattcagactggttccaaatgtactgccagatagtagcatttctctagtgtttgttttcatcctggcttgtaagaatgccctgccacttctgccctgcaatatcccttgctattagga

SEQ ID NO: 119 - DNA, 1088 bp, Homo sapiens
acgccattctcctgcctcagcctcctgagtagctgagactacaggtgcccgccaccacgcctggctaattttttgtatttttagtagagacagggtttcaccgtgttagccaggatggtctcgatctcctgaccttgtgatctgcccgcctcagcctcccaaagtgctgagattacaggcgtgagccaccgcgcccagccgagacttcaggtgtcttagaattttttaaatgtaccctttctgagaaaaacagagacttaaagctaggataactggtattctattttttttttttttttttttttacctccagcctgggtgacagagcaagactctgtctaaaaaaaaaaaaaaaaaaattcactttaaatagttccaggacacgtgtagaacgtgcaggattgctacataggtaaacatatgccatggtggaataactagtattctgagctgtgtgctagaggtaactcatgataatggaatatttgatttaatttcagatgctcgtgtacaagtttgccagaaaacaccacatcactttaactaatctaattactgaagagactactcatgttgttatgaaaacaggtataccaagaacctttacagaataccttgcatctgctgcataaaaccacatgaggcgaggcacggtggcgcatgcctgtaatcgcagcactttgggaggccgaggcgggcagatcacgagattaggagatcgagaccatcctggccagcatggtgaaaccccgtctctactaaaaaataaaaaaattagctgggtgtggtcgcgtgcgcctgtagtcccagctactcgtgaggctgaggcaggagaatcacttgaaccggggagatggaggttgcagtgagccgagatcatgccactgcattccagcctggcgacagagcaaggctccgtctcaaaaaaaaaaaaaaaaaacgtgaaaaaataagaatatttgttgagcatagcatggatgatagtcttctaatagtcaatcaattactttatgaaagacaaataatagttttgctgcttccttacctccttttgttttgggttaagatttggagtgtgggccaggcac

SEQ ID NO: 120 - DNA, 1078 bp, Homo sapiens
tctcaggggaatattagagggttaggactccccaggtagacattctaggggtgaaaatttgtcattacattgacatttcagatttaggttttcaacaatactgttttcttctttcacatattgccatctagtaatatagatgttctccgtccacattaatcaaaactattgacatggataattcctaattccttgaacactataatggagatctatagctagccttggcgtctagaagatgggtgttgagaagagggagtggacagatatttcctctggtcttaacttcatatcagcctcccctagacttccaaatatccatacctgctggttataattagtggtgttttcagcctctgattctgtcaccaggggttttagaatcataaatccagattgatcttgggagtgtaaaaaactgaggctctttagcttcttaggacagcacttcctgattttgttttcaacttctaatcctttgagtgtttttcattctgcagatgctgagtttgtgtgtgaacggacactgaaatattttctaggaattgcgggaggaaaatgggtagttagctatttctgtaagtataatactatttctcccctcctccctttaacacctcagaattgcatttttacacctaacgtttaacacctaaggtttttgctgatgctgagtctgagttaccaaaaggtctttaattgtaatactaaactacttttatctttaatatcactttgttcagataagctggtgatgctgggaaaatgggtctcttttataactaataggacctaatctgctcctagcaatgttagcatatgagctagggatttatttaatagtcggcaggaatccatgtgcagcaggcaaacttataatgtttaaattaaacatcaactctgtctccagaaggaaactgctgctacaagccttattaaagggctgtggctttagagggaaggacctctcctctgtcattcttcctgtgctcttttgtgaatcgctgacctctctatctccgtgaaaagagcacgttcttctgctgtatgtaacctgtcttttctatgatctctttag

SEQ ID NO: 121 - DNA, 1041 bp, Homo sapiens
gtaagtataatactatttctcccctcctccctttaacacctcagaattgcatttttacacctaacgtttaacacctaaggtttttgctgatgctgagtctgagttaccaaaaggtctttaattgtaatactaaactacttttatctttaatatcactttgttcagataagctggtgatgctgggaaaatgggtctcttttataactaataggacctaatctgctcctagcaatgttagcatatgagctagggatttatttaatagtcggcaggaatccatgtgcagcaggcaaacttataatgtttaaattaaacatcaactctgtctccagaaggaaactgctgctacaagccttattaaagggctgtggctttagagggaaggacctctcctctgtcattcttcctgtgctcttttgtgaatcgctgacctctctatctccgtgaaaagagcacgttcttctgctgtatgtaacctgtcttttctatgatctctttaggggtgacccagtctattaaagaaagaaaaatgctgaatgaggtaagtacttgatgttacaaactaaccagagatattcattcagtcatatagttaaaaatgtatttgcttccttccatcaatgcaccactttccttaacaatgcacaaattttccatgataatgaggatcatcaagaattatgcaggcctgcactgtggctcatacctataatcccagcgctttgggaggctgaggcgcttggatcacctgatgtcgggagttcaagaccagcctgaccaacatggagaaaccccgtttctactaaaaatacaaaattagccgggcttggtggcacttgcctgtaattccagctactcgggaggctgaggcaggagaatcacttgaacctgggaggcgggggttgcagtgagctgagatcgcatcattgcactctaacctgggcaacaagagcaaaactccatcaaaagaaaaaaaaaatcgggtgcagtggctcatgcctgtaatcctaacactgtgggaggccaagacaggcagattgc

SEQ ID NO: 122 - DNA, 1084 bp, Homo sapiens
tctcgatctcctgacctcgtgatccgcctgtctcggcctcccaaagtcctgggattacaggcgtgagccaccacacccggcctaatttttttttttttaattttatttttaattttttgagatgcgagatggagtctcgctctgttacccaggctggagtgcagtggcaccatctcagctcactgcaacctccacctcctgcattcaaaagattctcctgcctcagcctcccaagtagctgggattacaggtgcctgccaccacgcccaactaattttttgtatttttagtagagatgaggtttcaccatgttggtcagactggtgtcgaactcctgacctcaagtgatctgcctgcctcagtctcccaaagtgctaggattacaggggtgagccactgcgcctggcctgaatgccttaaatatgacgtgtctgctccacttccattgaaggaagcttctctttctcttatcctgatgggttgtgtttggtttctttcagcatgattttgaagtcagaggagatgtggtcaatggaagaaaccaccaaggtccaaagcgagcaagagaatcccaggacagaaaggtaaagctccctccctcaagttgacaaaaatctcaccccaccactctgtattccactcccctttgcagagatgggccgcttcattttgtaagacttattacatacatacacagtgctagatactttcacacaggttcttttttcactcttccatcccaaccacataaataagtattgtctctactttatgaatgataaaactaagagatttagagaggctgtgtaatttggattcccgtctcgggttcagatcttagctgataagtggaagagctgggactttaagcagatgagaatctaaagactttgctcttttcacttcactggggtgtctttctctctctctctcttgctctctctctctctttttttttttcccaagacggagtctcactccattgcccaggccagagtgcagtggtgcgatctcagctcactgaaaactcatcttgcccaggctggtcttgaacccctgaccttgtgatcctcccgccttggcc

SEQ ID NO: 123 - DNA, 1055 bp, Homo sapiens
gtacacctaaaatcaacatagacccctctgttgatggggtcatagtgagtacttgaggtaccaagtctggataaacatcaaacttcagccaataactttgagtttctagccatccaagcctcttattaaacatacagaaggaccttttttcccttgcatctaacaagttaaagcacctgcagagatcattagggaggagccttggcctgattggtgacaaaagtgagatgctcagtccttgaatgacaaagaatgcctgtagagtgcaggtcaactacatatgcacttcaagaagatcttctgaaatccagtagtgttctggacattggactgcttgtccctgggaagtagcagcagaaatcatcaggtggtgaacagaagaaaaagaaaagctcttcctttttgaaagtctgttttttgaataaaagccaatattcttttataactagattttccttctctccattcccctgtccctctctcttcctctcttcttccagatcttcagggggctagaaatctgttgctatgggcccttcaccaacatgcccacaggtaagagcctgggagaaccccagagttccagcaccagcctttgtcttacatagtggagtattataagcaagatcccacgatgggggttcctcagattgctgaaatgttctagaggctattctatttctctaccactctccaaacaaaacagcacctaaatgttatcctatggcaaaaaaaaactataccttgtcccccttctcaagagcatgaaggtggttaatagttaggattcagtatgttatgtgttcagatggcgttgagctgctgttagtgccaacatgttagtgagaaaatatctttggataggtaaaaatcaaggaggagttctcctcttcctaaaccatcttaatttacttacatagaagaaagcacagcagctggcccaccacggacgggcccagagcaggggaagattctcggtgaacatttctttttttttttctttttttttgaggtcgagtctctgttgcccaggccagagtgcaatggcgcgatct

SEQ ID NO: 124 - DNA, 1074 bp, Homo sapiens
ctctaaccaggataacatgtatttttttgactggatgaattatcttcccatctcttgacatttacagtaattaccaccaagtatggtattttcagtggccgtgattatcagttaccaacacagaattaggatgaagggaggaagggagggaaggaaggtgggtgttttttcacacagtgtcttagccagcaatttagcaaattaatggaaattagatctttgatttttttttctttcaagcattttatttgagagactatcaaaccttataccaagtggccttatggagactgataaccagagtacatggcatatcagtggcaaattgacttaaaatccatacccctactattttaagaccattgtcctttggagcagagagacagactctcccattgagaggtcttgctataagccttcatccggagagtgtagggtagagggcctgggttaagtatgcagattactgcagtgattttacatctaaatgtccattttagatcaactggaatggatggtacagctgtgtggtgcttctgtggtgaaggagctttcatcattcacccttggcacagtaagtattgggtgccctgtcagagagggaggacacaatattctctcctgtgagcaagactggcacctgtcagtccctatggatgcccctactgtagcctcagaagtcttctctgcccacatacctgtgccaaaagactccatctgtaagggatgggtaaggatttgagaactgcacatattaaatatactgagggaagactttttccctctaactctttttcccatatgtccctccccctcctctctgtgactgccccagcatactgtgtttcaacaaatcatcaagaaatgatgggctggaggctgggcatggtggctcatgtctgtaatcccagcactttgggaggccgaggcaggtggatcacttgtcaggagtttgagaccagcctggccaacatggtgaaaccccatctgtactaaaaaaaaaaaaacaaaaagtagccaggcctggtggagcatgcctgtaatgccagctatttgggaagttgaggtgtgagc

SEQ ID NO: 125 - DNA, 1061 bp, Homo sapiens
gagaaatgatgggctgggccagtgccccacccctgtaatcacaacactgggaggccaaggtgggagaatcgcttgagcctgggagctgaagaccagcctgggcaatacagtaggacctcatgtctacaaaaaaattattaaaaattagccaaggctgggtgcggtggctcatgcctataatcccgggggtgaagttgagcccaggagtttgagaccagcctgggcaacatggcaaaaccctgtctctaccaaaaatacaaaaaaattagccaggggtggtggtacgtgtctgtagttccagctacttaggaggctgagatggaaggattgcttgagcccaggaggcagaggtggcagtgagctgagatcacaccactgcactccagcctgggtgacagagcaagaccctgtctcaaaaacaaacaaaaaaaatgatgaagtgacagttccagtagtcctactttgacactttgaatgctctttccttcctggggatccagggtgtccacccaattgtggttgtgcagccagatgcctggacagaggacaatggcttccatggtaaggtgcctgcatgtacctgtgctatatggggtccttttgcatgggtttggtttatcactcattacctggtgcttgagtagcacagttcttggcacattttaaatatttgttgaatgaatggctaaaatgtctttttgatgtttttattgttatttgttttatattgtaaaagtaatacatgaactgtttccatggggtgggagtaagatatgaatgttcatcacaaaaacataaatcaaggccgggcatggtggctcatgcctataattccagcactttgggaggtcaagatggaggtcaaggtgggagcctagaagttcgagaccagcctgggcaacataaggagacttcatctgtacaacaaatttaaaaagtagctgggtgtggtggcagatgcctgtagtcgcagctacttgggaagctgaggtgggaggatcacttgagctcaggaggttgatgcttcagtgagccacgatcacaccactgtactccagcct

SEQ ID NO: 126 - DNA, 2508 bp, Homo sapiens
gctgagatcgtgccattgcattccaggctgagcaacaagagcaagactccgtctcaaaaaaaaaaaaaaaaaaaaaaaaaggccaggtgcagtggctcacgcctgtaatcccagcactttgggaggccaaggtgggtggatcacctgaggtcaggagttccagagcagcctggccaacattgtgaaacccccgtctctactaaaaatacaaaaattagctgggtgtgatggcatgtgcctgtaattccagctactcaggaggcagagacaggagaattgcttgaacccaggaggcggaggttgaatgagccgagattgcgccatcacactctagcctcggcgacagagcaagactccgtctcaaaaaaaaaaaaaaaaaattagcttctacctcattaatcctaagaactcatacaaccaggaccctggagtcgattgattagagcctagtccaggagaatgaattgacactaatctctgcttgtgttctctgtctccagcaattgggcagatgtgtgaggcacctgtggtgacccgagagtgggtgttggacagtgtagcactctaccagtgccaggagctggacacctacctgataccccagatcccccacagccactactgactgcagccagccacaggtacagagccacaggaccccaagaatgagcttacaaagtggcctttccaggccctgggagctcctctcactcttcagtccttctactgtcctggctactaaatattttatgtacatcagcctgaaaaggacttctggctatgcaagggtcccttaaagattttctgcttgaagtctcccttggaaatctgccatgagcacaaaattatggtaatttttcacctgagaagattttaaaaccatttaaacgccaccaattgagcaagatgctgattcattatttatcagccctattctttctattcaggctgttgttggcttagggctggaagcacagagtggcttggcctcaagagaatagctggtttccctaagtttacttctctaaaaccctgtgttcacaaaggcagagagtcagacccttcaatggaaggagagtgcttgggatcgattatgtgacttaaagtcagaatagtccttgggcagttctcaaatgttggagtggaacattggggaggaaattctgaggcaggtattagaaatgaaaaggaaacttgaaacctgggcatggtggctcacgcctgtaatcccagcactttgggaggccaaggtgggcagatcactggaggtcaggagttcgaaaccagcctggccaacatggtgaaaccccatctctactaaaaatacagaaattagccggtcatggtggtggacacctgtaatcccagctactcaggtggctaaggcaggagaatcacttcagcccgggaggtggaggttgcagtgagccaagatcataccacggcactccagcctgggtgacagtgagactgtggctcaaaaaaaaaaaaaaaaaaaggaaaatgaaactagaagagatttctaaaagtctgagatatatttgctagatttctaaagaatgtgttctaaaacagcagaagattttcaagaaccggtttccaaagacagtcttctaattcctcattagtaataagtaaaatgtttattgttgtagctctggtatataatccattcctcttaaaatataagacctctggcatgaatatttcatatctataaaatgacagatcccaccaggaaggaagctgttgctttctttgaggtgatttttttcctttgctccctgttgctgaaaccatacagcttcataaataattttgcttgctgaaggaagaaaaagtgtttttcataaacccattatccaggactgtttatagctgttggaaggactaggtcttccctagcccccccagtgtgcaagggcagtgaagacttgattgtacaaaatacgttttgtaaatgttgtgctgttaacactgcaaataaacttggtagcaaacacttccaccatgaatgactgttcttgagacttaggccagccgactttctcagagccttttcactgtgcttcagtctcccactctgtaaaatgggggtaatgatagtatctacctcctaggatttattgaggcagcttaaataccttttgtatttcctgttgctgccaaaacaaattgttgcaaggtcagaagtctgaggtggctcaactgtttctttgtttcaggtttcatgaggccaaaataaaggtgttcgcagggcgtgttcccttctagaggctctgggtccttgcagttctaggactaagatccctgtttcccactggctgttggctgggcatcattctcagcttcttgaggctccccacattcctaggctcctggcctgtctgcctccatcttcaaaaccagcaatgggtggtcaagtttttctcacactgaatcttgctgactactgtatctttctaactcctgccagagacatttctctgtttctaagggctcaagtga

SEQ ID NO: 127 - DNA, 1500 bp, Homo sapiens
actagaagagatttctaaaagtctgagatatatttgctagatttctaaagaatgtgttctaaaacagcagaagattttcaagaaccggtttccaaagacagtcttctaattcctcattagtaataagtaaaatgtttattgttgtagctctggtatataatccattcctcttaaaatataagacctctggcatgaatatttcatatctataaaatgacagatcccaccaggaaggaagctgttgctttctttgaggtgatttttttcctttgctccctgttgctgaaaccatacagcttcataaataattttgcttgctgaaggaagaaaaagtgtttttcataaacccattatccaggactgtttatagctgttggaaggactaggtcttccctagcccccccagtgtgcaagggcagtgaagacttgattgtacaaaatacgttttgtaaatgttgtgctgttaacactgcaaataaacttggtagcaaacacttccaccatgaatgactgttcttgagacttaggccagccgactttctcagagccttttcactgtgcttcagtctcccactctgtaaaatgggggtaatgatagtatctacctcctaggatttattgaggcagcttaaataccttttgtatttcctgttgctgccaaaacaaattgttgcaaggtcagaagtctgaggtggctcaactgtttctttgtttcaggtttcatgaggccaaaataaaggtgttcgcagggcgtgttcccttctagaggctctgggtccttgcagttctaggactaagatccctgtttcccactggctgttggctgggcatcattctcagcttcttgaggctccccacattcctaggctcctggcctgtctgcctccatcttcaaaaccagcaatgggtggtcaagtttttctcacactgaatcttgctgactactgtatctttctaactcctgccagagacatttctctgtttctaagggctcaagtgattagattgcacccacttggtaatccaaagtgatcttcatatcttaaggcccatagccttaattatagctgcaaagtcccttcgcagcagtacctagattactgttggaatgaataaccagaagacagcaatcaagggaggacatctttagaattctgcctaccacttgtatttaacatgcttaatccacagatgacactctctaccattatttcctggtcctcacactgctcagagattggaatcctttttgagcaaagagaatgaagtcatcacatagttcagtcctgctgtatttgctggaaacagtgaaggaagatagagaaaatggagctaactgccaatattacattttatatcagtcttcatcatagccctatgaagtgggtatttgttacctcattggaaaaatgggagttgaatctcaagttccttgtttgtaagattttactcagatttgcacagctaaaaatgactacatggagacccaaagccaccttt

SEQ ID NO: 128 - DNA, 11386 bp, Homo sapiens
gtggcgcgagcttctgaaactaggcggcagaggcggagccgctgtggcactgctgcgcctctgctgcgcctcgggtgtcttttgcggcggtgggtcgccgccgggagaagcgtgaggggacagatttgtgaccggcgcggtttttgtcagcttactccggccaaaaaagaactgcacctctggagcggacttatttaccaagcattggaggaatatcgtaggtaaaaatgcctattggatccaaagagaggccaacattttttgaaatttttaagacacgctgcaacaaagcagatttaggaccaataagtcttaattggtttgaagaactttcttcagaagctccaccctataattctgaacctgcagaagaatctgaacataaaaacaacaattacgaaccaaacctatttaaaactccacaaaggaaaccatcttataatcagctggcttcaactccaataatattcaaagagcaagggctgactctgccgctgtaccaatctcctgtaaaagaattagataaattcaaattagacttaggaaggaatgttcccaatagtagacataaaagtcttcgcacagtgaaaactaaaatggatcaagcagatgatgtttcctgtccacttctaaattcttgtcttagtgaaagtcctgttgttctacaatgtacacatgtaacaccacaaagagataagtcagtggtatgtgggagtttgtttcatacaccaaagtttgtgaagggtcgtcagacaccaaaacatatttctgaaagtctaggagctgaggtggatcctgatatgtcttggtcaagttctttagctacaccacccacccttagttctactgtgctcatagtcagaaatgaagaagcatctgaaactgtatttcctcatgatactactgctaatgtgaaaagctatttttccaatcatgatgaaagtctgaagaaaaatgatagatttatcgcttctgtgacagacagtgaaaacacaaatcaaagagaagctgcaagtcatggatttggaaaaacatcagggaattcatttaaagtaaatagctgcaaagaccacattggaaagtcaatgccaaatgtcctagaagatgaagtatatgaaacagttgtagatacctctgaagaagatagtttttcattatgtttttctaaatgtagaacaaaaaatctacaaaaagtaagaactagcaagactaggaaaaaaattttccatgaagcaaacgctgatgaatgtgaaaaatctaaaaaccaagtgaaagaaaaatactcatttgtatctgaagtggaaccaaatgatactgatccattagattcaaatgtagcaaatcagaagccctttgagagtggaagtgacaaaatctccaaggaagttgtaccgtctttggcctgtgaatggtctcaactaaccctttcaggtctaaatggagcccagatggagaaaatacccctattgcatatttcttcatgtgaccaaaatatttcagaaaaagacctattagacacagagaacaaaagaaagaaagattttcttacttcagagaattctttgccacgtatttctagcctaccaaaatcagagaagccattaaatgaggaaacagtggtaaataagagagatgaagagcagcatcttgaatctcatacagactgcattcttgcagtaaagcaggcaatatctggaacttctccagtggcttcttcatttcagggtatcaaaaagtctatattcagaataagagaatcacctaaagagactttcaatgcaagtttttcaggtcatatgactgatccaaactttaaaaaagaaactgaagcctctgaaagtggactggaaatacatactgtttgctcacagaaggaggactccttatgtccaaatttaattgataatggaagctggccagccaccaccacacagaattctgtagctttgaagaatgcaggtttaatatccactttgaaaaagaaaacaaataagtttatttatgctatacatgatgaaacatcttataaaggaaaaaaaataccgaaagaccaaaaatcagaactaattaactgttcagcccagtttgaagcaaatgcttttgaagcaccacttacatttgcaaatgctgattcaggtttattgcattcttctgtgaaaagaagctgttcacagaatgattctgaagaaccaactttgtccttaactagctcttttgggacaattctgaggaaatgttctagaaatgaaacatgttctaataatacagtaatctctcaggatcttgattataaagaagcaaaatgtaataaggaaaaactacagttatttattaccccagaagctgattctctgtcatgcctgcaggaaggacagtgtgaaaatgatccaaaaagcaaaaaagtttcagatataaaagaagaggtcttggctgcagcatgtcacccagtacaacattcaaaagtggaatacagtgatactgactttcaatcccagaaaagtcttttatatgatcatgaaaatgccagcactcttattttaactcctacttccaaggatgttctgtcaaacctagtcatgatttctagaggcaaagaatcatacaaaatgtcagacaagctcaaaggtaacaattatgaatctgatgttgaattaaccaaaaatattcccatggaaaagaatcaagatgtatgtgctttaaatgaaaattataaaaacgttgagctgttgccacctgaaaaatacatgagagtagcatcaccttcaagaaaggtacaattcaaccaaaacacaaatctaagagtaatccaaaaaaatcaagaagaaactacttcaatttcaaaaataactgtcaatccagactctgaagaacttttctcagacaatgagaataattttgtcttccaagtagctaatgaaaggaataatcttgctttaggaaatactaaggaacttcatgaaacagacttgacttgtgtaaacgaacccattttcaagaactctaccatggttttatatggagacacaggtgataaacaagcaacccaagtgtcaattaaaaaagatttggtttatgttcttgcagaggagaacaaaaatagtgtaaagcagcatataaaaatgactctaggtcaagatttaaaatcggacatctccttgaatatagataaaataccagaaaaaaataatgattacatgaacaaatgggcaggactcttaggtccaatttcaaatcacagttttggaggtagcttcagaacagcttcaaataaggaaatcaagctctctgaacataacattaagaagagcaaaatgttcttcaaagatattgaagaacaatatcctactagtttagcttgtgttgaaattgtaaataccttggcattagataatcaaaagaaactgagcaagcctcagtcaattaatactgtatctgcacatttacagagtagtgtagttgtttctgattgtaaaaatagtcatataacccctcagatgttattttccaagcaggattttaattcaaaccataatttaacacctagccaaaaggcagaaattacagaactttctactatattagaagaatcaggaagtcagtttgaatttactcagtttagaaaaccaagctacatattgcagaagagtacatttgaagtgcctgaaaaccagatgactatcttaaagaccacttctgaggaatgcagagatgctgatcttcatgtcataatgaatgccccatcgattggtcaggtagacagcagcaagcaatttgaaggtacagttgaaattaaacggaagtttgctggcctgttgaaaaatgactgtaacaaaagtgcttctggttatttaacagatgaaaatgaagtggggtttaggggcttttattctgctcatggcacaaaactgaatgtttctactgaagctctgcaaaaagctgtgaaactgtttagtgatattgagaatattagtgaggaaacttctgcagaggtacatccaataagtttatcttcaagtaaatgtcatgattctgttgtttcaatgtttaagatagaaaatcataatgataaaactgtaagtgaaaaaaataataaatgccaactgatattacaaaataatattgaaatgactactggcacttttgttgaagaaattactgaaaattacaagagaaatactgaaaatgaagataacaaatatactgctgccagtagaaattctcataacttagaatttgatggcagtgattcaagtaaaaatgatactgtttgtattcataaagatgaaacggacttgctatttactgatcagcacaacatatgtcttaaattatctggccagtttatgaaggagggaaacactcagattaaagaagatttgtcagatttaacttttttggaagttgcgaaagctcaagaagcatgtcatggtaatacttcaaataaagaacagttaactgctactaaaacggagcaaaatataaaagattttgagacttctgatacattttttcagactgcaagtgggaaaaatattagtgtcgccaaagagtcatttaataaaattgtaaatttctttgatcagaaaccagaagaattgcataacttttccttaaattctgaattacattctgacataagaaagaacaaaatggacattctaagttatgaggaaacagacatagttaaacacaaaatactgaaagaaagtgtcccagttggtactggaaatcaactagtgaccttccagggacaacccgaacgtgatgaaaagatcaaagaacctactctattgggttttcatacagctagcgggaaaaaagttaaaattgcaaaggaatctttggacaaagtgaaaaacctttttgatgaaaaagagcaaggtactagtgaaatcaccagttttagccatcaatgggcaaagaccctaaagtacagagaggcctgtaaagaccttgaattagcatgtgagaccattgagatcacagctgccccaaagtgtaaagaaatgcagaattctctcaataatgataaaaaccttgtttctattgagactgtggtgccacctaagctcttaagtgataatttatgtagacaaactgaaaatctcaaaacatcaaaaagtatctttttgaaagttaaagtacatgaaaatgtagaaaaagaaacagcaaaaagtcctgcaacttgttacacaaatcagtccccttattcagtcattgaaaattcagccttagctttttacacaagttgtagtagaaaaacttctgtgagtcagacttcattacttgaagcaaaaaaatggcttagagaaggaatatttgatggtcaaccagaaagaataaatactgcagattatgtaggaaattatttgtatgaaaataattcaaacagtactatagctgaaaatgacaaaaatcatctctccgaaaaacaagatacttatttaagtaacagtagcatgtctaacagctattcctaccattctgatgaggtatataatgattcaggatatctctcaaaaaataaacttgattctggtattgagccagtattgaagaatgttgaagatcaaaaaaacactagtttttccaaagtaatatccaatgtaaaagatgcaaatgcatacccacaaactgtaaatgaagatatttgcgttgaggaacttgtgactagctcttcaccctgcaaaaataaaaatgcagccattaaattgtccatatctaatagtaataattttgaggtagggccacctgcatttaggatagccagtggtaaaatcgtttgtgtttcacatgaaacaattaaaaaagtgaaagacatatttacagacagtttcagtaaagtaattaaggaaaacaacgagaataaatcaaaaatttgccaaacgaaaattatggcaggttgttacgaggcattggatgattcagaggatattcttcataactctctagataatgatgaatgtagcacgcattcacataaggtttttgctgacattcagagtgaagaaattttacaacataaccaaaatatgtctggattggagaaagtttctaaaatatcaccttgtgatgttagtttggaaacttcagatatatgtaaatgtagtatagggaagcttcataagtcagtctcatctgcaaatacttgtgggatttttagcacagcaagtggaaaatctgtccaggtatcagatgcttcattacaaaacgcaagacaagtgttttctgaaatagaagatagtaccaagcaagtcttttccaaagtattgtttaaaagtaacgaacattcagaccagctcacaagagaagaaaatactgctatacgtactccagaacatttaatatcccaaaaaggcttttcatataatgtggtaaattcatctgctttctctggatttagtacagcaagtggaaagcaagtttccattttagaaagttccttacacaaagttaagggagtgttagaggaatttgatttaatcagaactgagcatagtcttcactattcacctacgtctagacaaaatgtatcaaaaatacttcctcgtgttgataagagaaacccagagcactgtgtaaactcagaaatggaaaaaacctgcagtaaagaatttaaattatcaaataacttaaatgttgaaggtggttcttcagaaaataatcactctattaaagtttctccatatctctctcaatttcaacaagacaaacaacagttggtattaggaaccaaagtgtcacttgttgagaacattcatgttttgggaaaagaacaggcttcacctaaaaacgtaaaaatggaaattggtaaaactgaaactttttctgatgttcctgtgaaaacaaatatagaagtttgttctacttactccaaagattcagaaaactactttgaaacagaagcagtagaaattgctaaagcttttatggaagatgatgaactgacagattctaaactgccaagtcatgccacacattctctttttacatgtcccgaaaatgaggaaatggttttgtcaaattcaagaattggaaaaagaagaggagagccccttatcttagtgggagaaccctcaatcaaaagaaacttattaaatgaatttgacaggataatagaaaatcaagaaaaatccttaaaggcttcaaaaagcactccagatggcacaataaaagatcgaagattgtttatgcatcatgtttctttagagccgattacctgtgtaccctttcgcacaactaaggaacgtcaagagatacagaatccaaattttaccgcacctggtcaagaatttctgtctaaatctcatttgtatgaacatctgactttggaaaaatcttcaagcaatttagcagtttcaggacatccattttatcaagtttctgctacaagaaatgaaaaaatgagacacttgattactacaggcagaccaaccaaagtctttgttccaccttttaaaactaaatcacattttcacagagttgaacagtgtgttaggaatattaacttggaggaaaacagacaaaagcaaaacattgatggacatggctctgatgatagtaaaaataagattaatgacaatgagattcatcagtttaacaaaaacaactccaatcaagcagcagctgtaactttcacaaagtgtgaagaagaacctttagatttaattacaagtcttcagaatgccagagatatacaggatatgcgaattaagaagaaacaaaggcaacgcgtctttccacagccaggcagtctgtatcttgcaaaaacatccactctgcctcgaatctctctgaaagcagcagtaggaggccaagttccctctgcgtgttctcataaacagctgtatacgtatggcgtttctaaacattgcataaaaattaacagcaaaaatgcagagtcttttcagtttcacactgaagattattttggtaaggaaagtttatggactggaaaaggaatacagttggctgatggtggatggctcataccctccaatgatggaaaggctggaaaagaagaattttatagggctctgtgtgacactccaggtgtggatccaaagcttatttctagaatttgggtttataatcactatagatggatcatatggaaactggcagctatggaatgtgcctttcctaaggaatttgctaatagatgcctaagcccagaaagggtgcttcttcaactaaaatacagatatgatacggaaattgatagaagcagaagatcggctataaaaaagataatggaaagggatgacacagctgcaaaaacacttgttctctgtgtttctgacataatttcattgagcgcaaatatatctgaaacttctagcaataaaactagtagtgcagatacccaaaaagtggccattattgaacttacagatgggtggtatgctgttaaggcccagttagatcctcccctcttagctgtcttaaagaatggcagactgacagttggtcagaagattattcttcatggagcagaactggtgggctctcctgatgcctgtacacctcttgaagccccagaatctcttatgttaaagatttctgctaacagtactcggcctgctcgctggtataccaaacttggattctttcctgaccctagaccttttcctctgcccttatcatcgcttttcagtgatggaggaaatgttggttgtgttgatgtaattattcaaagagcataccctatacagtggatggagaagacatcatctggattatacatatttcgcaatgaaagagaggaagaaaaggaagcagcaaaatatgtggaggcccaacaaaagagactagaagccttattcactaaaattcaggaggaatttgaagaacatgaagaaaacacaacaaaaccatatttaccatcacgtgcactaacaagacagcaagttcgtgctttgcaagatggtgcagagctttatgaagcagtgaagaatgcagcagacccagcttaccttgagggttatttcagtgaagagcagttaagagccttgaataatcacaggcaaatgttgaatgataagaaacaagctcagatccagttggaaattaggaaggccatggaatctgctgaacaaaaggaacaaggtttatcaagggatgtcacaaccgtgtggaagttgcgtattgtaagctattcaaaaaaagaaaaagattcagttatactgagtatttggcgtccatcatcagatttatattctctgttaacagaaggaaagagatacagaatttatcatcttgcaacttcaaaatctaaaagtaaatctgaaagagctaacatacagttagcagcgacaaaaaaaactcagtatcaacaactaccggtttcagatgaaattttatttcagatttaccagccacgggagccccttcacttcagcaaatttttagatccagactttcagccatcttgttctgaggtggacctaataggatttgtcgtttctgttgtgaaaaaaacaggacttgcccctttcgtctatttgtcagacgaatgttacaatttactggcaataaagttttggatagaccttaatgaggacattattaagcctcatatgttaattgctgcaagcaacctccagtggcgaccagaatccaaatcaggccttcttactttatttgctggagatttttctgtgttttctgctagtccaaaagagggccactttcaagagacattcaacaaaatgaaaaatactgttgagaatattgacatactttgcaatgaagcagaaaacaagcttatgcatatactgcatgcaaatgatcccaagtggtccaccccaactaaagactgtacttcagggccgtacactgctcaaatcattcctggtacaggaaacaagcttctgatgtcttctcctaattgtgagatatattatcaaagtcctttatcactttgtatggccaaaaggaagtctgtttccacacctgtctcagcccagatgacttcaaagtcttgtaaaggggagaaagagattgatgaccaaaagaactgcaaaaagagaagagccttggatttcttgagtagactgcctttacctccacctgttagtcccatttgtacatttgtttctccggctgcacagaaggcatttcagccaccaaggagttgtggcaccaaatacgaaacacccataaagaaaaaagaactgaattctcctcagatgactccatttaaaaaattcaatgaaatttctcttttggaaagtaattcaatagctgacgaagaacttgcattgataaatacccaagctcttttgtctggttcaacaggagaaaaacaatttatatctgtcagtgaatccactaggactgctcccaccagttcagaagattatctcagactgaaacgacgttgtactacatctctgatcaaagaacaggagagttcccaggccagtacggaagaatgtgagaaaaataagcaggacacaattacaactaaaaaatatatctaagcatttgcaaaggcgacaataaattattgacgcttaacctttccagtttataagactggaatataatttcaaaccacacattagtacttatgttgcacaatgagaaaagaaattagtttcaaatttacctcagcgtttgtgtatcgggcaaaaatcgttttgcccgattccgtattggtatacttttgcttcagttgcatatcttaaaactaaatgtaatttattaactaatcaagaaaaacatctttggctgagctcggtggctcatgcctgtaatcccaacactttgagaagctgaggtgggaggagtgcttgaggccaggagttcaagaccagcctgggcaacatagggagacccccatctttacaaagaaaaaaaaaaggggaaaagaaaatcttttaaatctttggatttgatcactacaagtattattttacaagtgaaataaacataccattttcttttagattgtgtcattaaatggaatgaggtctcttagtacagttattttgatgcagataattccttttagtttagctactattttaggggattttttttagaggtaactcactatgaaatagttctccttaatgcaaatatgttggttctgctatagttccatcctgttcaaaagtcaggatgaatatgaagagtggtgtttccttttgagcaattcttcatccttaagtcagcatgattataagaaaaatagaaccctcagtgtaactctaattcctttttactattccagtgtgatctctgaaattaaattacttcaactaaaaattcaaatactttaaatcagaagatttcatagttaatttattttttttttcaacaaaatggtcatccaaactcaaacttgagaaaatatcttgctttcaaattggcactgatt

SEQ ID NO: 129 - DNA, 1500 bp, Homo sapiens
agaaccaacgaattcggagatgaagtcaggtcttccagttcagcctgcgaggaagacaggtgatccgaatcctaagaatgcaaaagatgggccgggtgtggtggctcatgcctgtaatcccagcgctttgggaggccgaggcaggcagatcacctgaggtcgggaggttgagaccagactgaccaacaacggagaaaccccgtctctacttaaaaatgcaaagttagccgtgcgtggtggcccatgcctgtattcccagctactcgggaggctgaggcaggagaaccacttgatccctggaggcggaagttgcggtgagcggagattgcgccattgcacaccagcccgggccacaagagcgaaactccgtctcaaaaaaaaaagcaaaagatactaccaagccctgcggagcaaggtacctcacacttcatgagcgagttaagatgggtttcacaatttttcaagcaaggaaacgggctcggaggtcttgaacacctgctacccaatagcagaacagctactggaactaaaatcctctgatttcaaataacagccccgcccactaccactaagtgaagtcatccacaaccacacaccgaccactctaagcttttgtaagatcggctcgctttggggaacaggtcttgagagaacatcccttttaaggtcagaacaaaggtatttcataggtcccaggtcgtgtcccgagggcgcccacccaaacatgagctggagcaaaaagaaagggatgggggacttggagtaggcataggggcggcccctccaagcagggtggcctgggactcttaagggtcagcgagaagagaacacacactccagctcccgctttattcggtcagatactgacggttgggatgcctgacaaggaatttcctttcgccacactgagaaatacccgcagcggcccacccaggcctgacttccgggtggtgcgtgtgctgcgtgtcgcgtcacggcgtcacgtggccagcgcgggcttgtggcgcgagcttctgaaactaggcggcagaggcggagccgctgtggcactgctgcgcctctgctgcgcctcgggtgtcttttgcggcggtgggtcgccgccgggagaagcgtgaggggacagatttgtgaccggcgcggtttttgtcagcttactccggccaaaaaagaactgcacctctggagcgggttagtggtggtggtagtgggttgggacgagcgcgtcttccgcagtcccagtccagcgtggcgggggagcgcctcacgccccgggtcgctgccgcggcttcttgcccttttgtctctgccaacccccacccatgcctgagagaaaggtccttgcccgaaggcagattttcgccaagcaaattcgagccccgccccttccctgggtctccatttcccgcctccggcccggcctttgggctccgccttcagctcaagacttaacttccctcccagctgtcccagatgacgccatctgaaatttcttggaaacac

SEQ ID NO: 130 - DNA, 1188 bp, Homo sapiens
acccaatagcagaacagctactggaactaaaatcctctgatttcaaataacagccccgcccactaccactaagtgaagtcatccacaaccacacaccgaccactctaagcttttgtaagatcggctcgctttggggaacaggtcttgagagaacatcccttttaaggtcagaacaaaggtatttcataggtcccaggtcgtgtcccgagggcgcccacccaaacatgagctggagcaaaaagaaagggatgggggacttggagtaggcataggggcggcccctccaagcagggtggcctgggactcttaagggtcagcgagaagagaacacacactccagctcccgctttattcggtcagatactgacggttgggatgcctgacaaggaatttcctttcgccacactgagaaatacccgcagcggcccacccaggcctgacttccgggtggtgcgtgtgctgcgtgtcgcgtcacggcgtcacgtggccagcgcgggcttgtggcgcgagcttctgaaactaggcggcagaggcggagccgctgtggcactgctgcgcctctgctgcgcctcgggtgtcttttgcggcggtgggtcgccgccgggagaagcgtgaggggacagatttgtgaccggcgcggtttttgtcagcttactccggccaaaaaagaactgcacctctggagcgggttagtggtggtggtagtgggttgggacgagcgcgtcttccgcagtcccagtccagcgtggcgggggagcgcctcacgccccgggtcgctgccgcggcttcttgcccttttgtctctgccaacccccacccatgcctgagagaaaggtccttgcccgaaggcagattttcgccaagcaaattcgagccccgccccttccctgggtctccatttcccgcctccggcccggcctttgggctccgccttcagctcaagacttaacttccctcccagctgtcccagatgacgccatctgaaatttcttggaaacacgatcactttaacggaatattgctgttttggggaagtgttttacagctgctgggcacgctgtatttgccttacttaagcccctggtaattgctgtattccgaagacatgctgatgggaattaccaggcggcgttggtctctaactggagccctctgtccccactagccacgcgtcactggttagcgtga

SEQ ID NO: 131 - DNA, 1106 bp, Homo sapiens
gacttaacttccctcccagctgtcccagatgacgccatctgaaatttcttggaaacacgatcactttaacggaatattgctgttttggggaagtgttttacagctgctgggcacgctgtatttgccttacttaagcccctggtaattgctgtattccgaagacatgctgatgggaattaccaggcggcgttggtctctaactggagccctctgtccccactagccacgcgtcactggttagcgtgattgaaactaaatcgtatgaaaatcctcttctctagtcgcactagccacgtttcgagtgcttaatgtggctagtggcaccggtttggacagcacagctgtaaaatgttcccatcctcacagtaagctgttaccgttccaggagatgggactgaattagaattcaaacaaattttccagcgcttctgagttttacctcagtcacataataaggaatgcatccctgtgtaagtgcattttggtcttctgttttgcagacttatttaccaagcattggaggaatatcgtaggtaaaaatgcctattggatccaaagagaggccaacattttttgaaatttttaagacacgctgcaacaaagcaggtattgacaaattttatataactttataaattacaccgagaaagtgttttctaaaaaatgcttgctaaaaacccagtacgtcacagtgttgcttagaaccataaactgttccttatgtgtgtataaatccagttaacaacataatcatcgtttgcaggttaaccacatgataaatatagaacgtctagtggataaagaggaaactggccccttgactagcagtaggaacaattactaacaaatcagaagcattaatgttactttatggcagaagttgtccaactttttggtttcagtactccttatactcttaaaaatgatctaggacccccggagtgcttttgtttatgtagcttaccatattagaaatttaaaactaagaatttaaggctgggcgtggtggctcacgcctgtaatcccagcactttgggaggccgaggtgggcggatcacttgaggccagaagtttgagaccagcctggccaacatggtgaaacccta

SEQ ID NO: 132 - DNA, 1249 bp, Homo sapiens
gactacaggcgtgtgccaccatgcttggctaattttttgtgtttttagtaaagatggggtttcaacgtgttagcaaggttggtctcgatctgacctcgtgatctgctcgcctcagcctcccaaagtgttgggattacaggcgtgagcccccgcacctggccgaattttatcgtggaatgtattcttaatgtgaatagtttttgattccgaaccatgaataataagaaaataaataaaatttaaatgaaaataaaagctaatatatacagcttttaataatatagttaaatgccatcttgtaacttttgtgaactcttgttacacctttctatagattcgcaagagaatggattaatgatcttgtttaattaatatgccttaacaaaagtaatccatagtcaagatcttaagcatttttttccttatgatctttaactgttctgggtcacaaatttgtctgtcactggttaaaactaaggtgggattttttttttaaatagatttaggaccaataagtcttaattggtttgaagaactttcttcagaagctccaccctataattctgaacctgcagaagaatctgaacataaaaacaacaattacgaaccaaacctatttaaaactccacaaaggaaaccatcttataatcagctggcttcaactccaataatattcaaagagcaagggctgactctgccgctgtaccaatctcctgtaaaagaattagataaattcaaattagacttaggtaagtaatgcaatatggtagactggggagaactacaaactaggaatttaggcaaacctgtgttaaaatcttagctcattcattaattgtgtcatgctgggcaaatcagtctctctggcctctttttcctcactcgaaaaatggagacgatgaaaataatgtctcataggtttggattaaattaaataatgtaggtacttagtaaatgttctctttcatccctcctttgataaatttgccaactgagatttgctgaattacgtctttcttatgccaaaaaaacctaggacttgttttgatgttaattaaactaaactatatttctgcaagctatcacagaggacagagattattttaccgatatactataagtatcatgatttggaaggagtttccctggcgtaggtgccgcatgtttctaagcaattatgtaataagattatatattcagtcattcaaataattattacctacttgacataagtaatgaactttccctt

SEQ ID NO: 133 - DNA, 1109 bp, Homo sapiens
gtcagatctggtacattggtaggttttcagtaaatgtcttcccttactccttttttctctttccttctgcttttgtttaaagcgacaagatgttgctcttttcccaggctggaatacagtggcatgatcatagctcaagctcctgggctcaagtgatcctcccgcctcagcctctcaagtagctaggactacaggcatatcaccacaccagcgttttctttgtagaggcagagtctcactctgttgctcaggcaggtgttgaactcctgcctcaagcaatcctcccacctcagcctcccagagccctcaaattataagccactgtgctcggggcatcctttttggggggtaatcagcaaactgaaaaacctcttcttacaactccctatacattctcattcccagtatagaggagactttttgtttttaaacacttccaaagaatgcaaatttataatccagagtatatacattctcactgaattattgtactgtttcaggaaggaatgttcccaatagtagacataaaagtcttcgcacagtgaaaactaaaatggatcaagcagatgatgtttcctgtccacttctaaattcttgtcttagtgaaaggtatgatgaagctattatattaaaatatttaaatgaaacattttcctacatatatttgttctataaagatgaatctgatttttatgctaatattttggctaagagcctggtagaagatcttacatttttaaataatcttttaggttgagtcctttaatagaatagtttttacattagaaacatgtaagttgttgttcttgtgatgttgaattggctggttttctgtatattctgtgattttttaagtaacaaaaataacagtggtgaaaagcagtaagtcagtccttgaattatcaatttaaaataaattgtgtacttttcatctttggagagaatatgatttactttacaaattttttttttgttttttttttttttgagatggagtctctgtcacccaggctgtagtgcagtggtgcgatctcagctcactgcaagctccgcctcccgggttcacgccattctcctgcctcagcctcccaagtagctgggactacagg

SEQ ID NO: 134 - DNA, 1050 bp, Homo sapiens
tgcgatctcagctcactgcaagctccgcctcccgggttcacgccattctcctgcctcagcctcccaagtagctgggactacaggcgcccgccaccatgcccggctaattttttgtatttttagtagagacggggtttcaccgtgttagctaggatggtctcgatttcctgacctcgtgatccgcccgcctcagcctcccagactgctgggattacaggcgtgaaccactgtgcccggcctactttacaaaatttttgagtttaaaatacacggtttccagcagctgaaatttgtgagtacatatgtgttggcattttaaacatcacttgatgattatttaatgcttcatgagagatttactttttaaaatgtaatataaaatatctaaaagtagtattccaacaatttatatgaatgagaatcttcttttaaaaataagataaactagtttttgccagttttttaaaataacctaagggatttgctttgttttattttagtcctgttgttctacaatgtacacatgtaacaccacaaagagataagtcaggtatgattaaaaacaatgctttttattcttagaatactagaaatgttaataaaaataaaacttaacaattttcccctttttttacccccagtggtatgtgggagtttgtttcatacaccaaagtttgtgaaggtaaatattctacctggtttatttttatgacttagtaattgagaatttgacaatagcgttatacctttgccctgagatttacaaatctgtacctagcattctgcctcatacaggcaattcagtaaacgttaagtgaaataaagagtgaatgaaaaaataatatccttaatgatcagggcatttctataaaaaataaactattttctttcctcccagggtcgtcagacaccaaaacatatttctgaaagtctaggagctgaggtggatcctgatatgtcttggtcaagttctttagctacaccacccacccttagttctactgtgctcataggtaataatagcaaatgtgtatttacaagaaagagcag

SEQ ID NO: 135 - DNA, 1041 bp, Homo sapiens
gtgttagctaggatggtctcgatttcctgacctcgtgatccgcccgcctcagcctcccagactgctgggattacaggcgtgaaccactgtgcccggcctactttacaaaatttttgagtttaaaatacacggtttccagcagctgaaatttgtgagtacatatgtgttggcattttaaacatcacttgatgattatttaatgcttcatgagagatttactttttaaaatgtaatataaaatatctaaaagtagtattccaacaatttatatgaatgagaatcttcttttaaaaataagataaactagtttttgccagttttttaaaataacctaagggatttgctttgttttattttagtcctgttgttctacaatgtacacatgtaacaccacaaagagataagtcaggtatgattaaaaacaatgctttttattcttagaatactagaaatgttaataaaaataaaacttaacaattttcccctttttttacccccagtggtatgtgggagtttgtttcatacaccaaagtttgtgaaggtaaatattctacctggtttatttttatgacttagtaattgagaatttgacaatagcgttatacctttgccctgagatttacaaatctgtacctagcattctgcctcatacaggcaattcagtaaacgttaagtgaaataaagagtgaatgaaaaaataatatccttaatgatcagggcatttctataaaaaataaactattttctttcctcccagggtcgtcagacaccaaaacatatttctgaaagtctaggagctgaggtggatcctgatatgtcttggtcaagttctttagctacaccacccacccttagttctactgtgctcataggtaataatagcaaatgtgtatttacaagaaagagcagatgaggttgataattgtcatctctaatacttctgttaaaaggaaatatgaaaagaaaatattagataatgtctttgataagtgtgttagtaactgacaataattttattctattaagtgtagattggaataa

SEQ ID NO: 136 - DNA, 1115 bp, Homo sapiens
ccaacaatttatatgaatgagaatcttcttttaaaaataagataaactagtttttgccagttttttaaaataacctaagggatttgctttgttttattttagtcctgttgttctacaatgtacacatgtaacaccacaaagagataagtcaggtatgattaaaaacaatgctttttattcttagaatactagaaatgttaataaaaataaaacttaacaattttcccctttttttacccccagtggtatgtgggagtttgtttcatacaccaaagtttgtgaaggtaaatattctacctggtttatttttatgacttagtaattgagaatttgacaatagcgttatacctttgccctgagatttacaaatctgtacctagcattctgcctcatacaggcaattcagtaaacgttaagtgaaataaagagtgaatgaaaaaataatatccttaatgatcagggcatttctataaaaaataaactattttctttcctcccagggtcgtcagacaccaaaacatatttctgaaagtctaggagctgaggtggatcctgatatgtcttggtcaagttctttagctacaccacccacccttagttctactgtgctcataggtaataatagcaaatgtgtatttacaagaaagagcagatgaggttgataattgtcatctctaatacttctgttaaaaggaaatatgaaaagaaaatattagataatgtctttgataagtgtgttagtaactgacaataattttattctattaagtgtagattggaataaatacaaatacatttagtggtagtccagtggtgtcaagcattatgttttagtacgatgtgattaacgtagaatagcttacaaatattcctttactggcctatataagcgtttaagaggcagtatttggtgtgactgaattctttttacaaatgattgtggtaattggggcattaaagcagcattaaataagcttttgttttctctacttaaatgtgttctaaggtctgtattgccagtagtactgaattgaggtcttaaattccacaagtgtaattacacaactatgtgataaactgcaatatttatccattcattaaactgtaaactcttt

SEQ ID NO: 137 - DNA, 1050 bp, Homo sapiens
accagtattacattttgtttattctagcaaaatagcattctgttttgattcctctttagctgggagtaagttaaccctattctgttgcttagatgaaataatatggataaaatcattttgaaaatatgtatttaatatatagtatgcctttaggctgtagtgttgtctaaatgaatgctaaagtctccaagctttagcttttaagtcataacctcacagcatcatctgactttccaactcattgtggacagtattaccataaagtaatgatcaccaagccatatcttaccaccttgtgagtagtactaaggaagtaagtatagtttattcactgtgttgattgacctttctaattactatacttaagtacttgaatcaattcattttgtttcaaatgtgtcatgtaatcaaatagtagatgtgctttttgatgtctgacaaaaaataagtttttgcattctagtgataatatacaatacacataaatttttatcttacagtcagaaatgaagaagcatctgaaactgtatttcctcatgatactactgctgtaagtaaatatgacattgattagactgttgaaattgctaacaattttggaatgccttgttaaattatttatcttacatttttaatttcctaatctgtaatttatctaagcctttgagaaagtctctaaacctggtcctatatgtgattttaacttcctgtgaaactctgctgtctctctgttaaagttgcatatatacaatatataccgtagtcccctattcatggggtatacattccaatatcccccagtgaatgcttgaaaccttagatagtaccgaaccctatatatatatattaaaaatgtgtagtatttatatatatatacctataatctttttttctataagcacataccctgtgataaagtttaattcataaattaggcacagtaagagattaacaagaactaataataaaataggacaattataacaaaataccgtaataaaagttatgtgaatgttgtctctctgtctcaaaatatcttattgttctgta

SEQ ID NO: 138 - DNA, 1112 bp, Homo sapiens
gcactttatggcttctttttggcatatttgaattgccagcatcattatacttgtgctttggggccattgttaagtaaaataagggtgacttgaacacaagcactgtggtaccacaatagccgatctgataaccaagacaactactaagtgactaataggtgggtaccatatacagcctggatacgctggacaaagggatgattcatgtcccaagtgggatggagcaagatggtgcaagtttttttttctccatttccattttcctttcctaagatttccacatcctagtggtgcaagatttcatcacactactcaggatgacacacaatttaaaacttactaattgcttacttctggaattttccattaaaaatttttggacctaggttgattgcagataactgaaatcaccaaaagtgaaaccatggataaggggggactactactatatgtgcattgagagtttttatactagtgattttaaactataatttttgcagaatgtgaaaagctatttttccaatcatgatgaaagtctgaagaaaaatgatagatttatcgcttctgtgacagacagtgaaaacacaaatcaaagagaagctgcaagtcatggtaagtcctctgtttagttgaactacaggtttttttgttgttgttgttttgattttttttttttgaggtggagtcttgctctgtcacccgtgatctcggtttaccgcaacctctgcctcccgtgctcaagcgatcctgcctcagcttgccaagtagctgagattacaagcatgcaccaccatgcccaactattgtatttttagtagagatggcatttcaccatgttggccaggctggtctcaaatggtcgtgagccaccatgcccagcctgaactactctttttaattggcaccattgaaggattgctcctcttttcttaaagagaaaatatattacctttcctttcttgactactgaagtagtattttatctcaaagtattgagagtagaaactaacttggtgtgcctgtgatcccagctactcaggaggctgaggtgggaggatcgcttaagcccaggcggtcaaggttgcagtgagctgtgtgtgtgccactgcact

SEQ ID NO: 139 - DNA, 2116 bp, Homo sapiens
aggtcatggaatattgcatttttcttagtatgtgtgtatgtctgtataactgtgtaggatttgatatctgtttttgtctgtgtggtatcatgtacgtatgtatatgcatatgtaaaatcagatttacccttgttatagggccacagaattgatttggaacatctgttttgataggtcttagaatatttaattgtatatatagtaagattaggtgagttttaattgtgtagaactgctaaagaaaggtttttagggattgttgtatgaataaaaggctttaggttcattggaatcaggggaatcaggctttactagaagaacaggagaaggggtgactgaccgaaaaataaaatgccaagtactcagaataaccctttaaatactgatatgtaatatttagcacattctacataaactgtttctatgagaaaggttgtgagaataatataaattatatggcttataaaatattaatgtgcttctgttttatactttaacaggatttggaaaaacatcagggaattcatttaaagtaaatagctgcaaagaccacattggaaagtcaatgccaaatgtcctagaagatgaagtatatgaaacagttgtagatacctctgaagaagatagtttttcattatgtttttctaaatgtagaacaaaaaatctacaaaaagtaagaactagcaagactaggaaaaaaattttccatgaagcaaacgctgatgaatgtgaaaaatctaaaaaccaagtgaaagaaaaatactcatttgtatctgaagtggaaccaaatgatactgatccattagattcaaatgtagcaaatcagaagccctttgagagtggaagtgacaaaatctccaaggaagttgtaccgtctttggcctgtgaatggtctcaactaaccctttcaggtctaaatggagcccagatggagaaaatacccctattgcatatttcttcatgtgaccaaaatatttcagaaaaagacctattagacacagagaacaaaagaaagaaagattttcttacttcagagaattctttgccacgtatttctagcctaccaaaatcagagaagccattaaatgaggaaacagtggtaaataagagagatgaagagcagcatcttgaatctcatacagactgcattcttgcagtaaagcaggcaatatctggaacttctccagtggcttcttcatttcagggtatcaaaaagtctatattcagaataagagaatcacctaaagagactttcaatgcaagtttttcaggtcatatgactgatccaaactttaaaaaagaaactgaagcctctgaaagtggactggaaatacatactgtttgctcacagaaggaggactccttatgtccaaatttaattgataatggaagctggccagccaccaccacacagaattctgtagctttgaagaatgcaggtttaatatccactttgaaaaagaaaacaaataagtttatttatgctatacatgatgaaacatcttataaaggaaaaaaaataccgaaagaccaaaaatcagaactaattaactgttcagcccagtttgaagcaaatgcttttgaagcaccacttacatttgcaaatgctgattcaggtacctctgtctttttttttttgtaaatagtacatatagttttatagatgacgattccttctgtgtttttttctgctttttaaaatcttcatatcttatatttaatcttaggcatcatctgtatacatgattgtttaggtctttaattaccagtgtttagaatcaggtcactcaaacatggtagataagtttgcatagtttgtgtatatccatcactcttgagacagttttattttaagttccggggtacatgtgcaggatgtgcaggtttgttacataagtaaacgtatgccatgttggtttgctgcacctgtcaacccttcacctgagtattaagcccagcatgcattagctatttttcctggtgctctccttccccccacacacccccacctcctgacagaccctagtgtgtgttgttcccctccctgtgtccgtgtgttctcattgttcagctcccacttatgagtgagaacatgtgatgtttagttttctgttcc

SEQ ID NO: 140 - DNA, 5932 bp, Homo sapiens
tgagctaaaaaatgtaataactgaaaaatagagcatatttaggattctttctgctttaaatttgacattcagttattttcatgtaatttgtgttttgagcactaccttttaattaatttatttatttttattttttagagactgtctcattctgttacctagtctggagtgcactagtgtgatctcagctcaccgtagcctcaccctcctgggctcaagcagtccttgcacctcaccctcctgagtaactggcaccacaggcatacaccaccacacccagctaatttttatttttcatagagtcatggtctcactatgttgcccaggctagtctcgaactcctgggctcaagcagtcttcctgcctcagcctcccaaaagtgctgagattacaggcatgagccactgtgcccaaacactacctttttaacttagtgaaaaatatttagtgaatgtgattgatggtactttaattttgtcactttgtgtttttatgtttaggtttattgcattcttctgtgaaaagaagctgttcacagaatgattctgaagaaccaactttgtccttaactagctcttttgggacaattctgaggaaatgttctagaaatgaaacatgttctaataatacagtaatctctcaggatcttgattataaagaagcaaaatgtaataaggaaaaactacagttatttattaccccagaagctgattctctgtcatgcctgcaggaaggacagtgtgaaaatgatccaaaaagcaaaaaagtttcagatataaaagaagaggtcttggctgcagcatgtcacccagtacaacattcaaaagtggaatacagtgatactgactttcaatcccagaaaagtcttttatatgatcatgaaaatgccagcactcttattttaactcctacttccaaggatgttctgtcaaacctagtcatgatttctagaggcaaagaatcatacaaaatgtcagacaagctcaaaggtaacaattatgaatctgatgttgaattaaccaaaaatattcccatggaaaagaatcaagatgtatgtgctttaaatgaaaattataaaaacgttgagctgttgccacctgaaaaatacatgagagtagcatcaccttcaagaaaggtacaattcaaccaaaacacaaatctaagagtaatccaaaaaaatcaagaagaaactacttcaatttcaaaaataactgtcaatccagactctgaagaacttttctcagacaatgagaataattttgtcttccaagtagctaatgaaaggaataatcttgctttaggaaatactaaggaacttcatgaaacagacttgacttgtgtaaacgaacccattttcaagaactctaccatggttttatatggagacacaggtgataaacaagcaacccaagtgtcaattaaaaaagatttggtttatgttcttgcagaggagaacaaaaatagtgtaaagcagcatataaaaatgactctaggtcaagatttaaaatcggacatctccttgaatatagataaaataccagaaaaaaataatgattacatgaacaaatgggcaggactcttaggtccaatttcaaatcacagttttggaggtagcttcagaacagcttcaaataaggaaatcaagctctctgaacataacattaagaagagcaaaatgttcttcaaagatattgaagaacaatatcctactagtttagcttgtgttgaaattgtaaataccttggcattagataatcaaaagaaactgagcaagcctcagtcaattaatactgtatctgcacatttacagagtagtgtagttgtttctgattgtaaaaatagtcatataacccctcagatgttattttccaagcaggattttaattcaaaccataatttaacacctagccaaaaggcagaaattacagaactttctactatattagaagaatcaggaagtcagtttgaatttactcagtttagaaaaccaagctacatattgcagaagagtacatttgaagtgcctgaaaaccagatgactatcttaaagaccacttctgaggaatgcagagatgctgatcttcatgtcataatgaatgccccatcgattggtcaggtagacagcagcaagcaatttgaaggtacagttgaaattaaacggaagtttgctggcctgttgaaaaatgactgtaacaaaagtgcttctggttatttaacagatgaaaatgaagtggggtttaggggcttttattctgctcatggcacaaaactgaatgtttctactgaagctctgcaaaaagctgtgaaactgtttagtgatattgagaatattagtgaggaaacttctgcagaggtacatccaataagtttatcttcaagtaaatgtcatgattctgttgtttcaatgtttaagatagaaaatcataatgataaaactgtaagtgaaaaaaataataaatgccaactgatattacaaaataatattgaaatgactactggcacttttgttgaagaaattactgaaaattacaagagaaatactgaaaatgaagataacaaatatactgctgccagtagaaattctcataacttagaatttgatggcagtgattcaagtaaaaatgatactgtttgtattcataaagatgaaacggacttgctatttactgatcagcacaacatatgtcttaaattatctggccagtttatgaaggagggaaacactcagattaaagaagatttgtcagatttaacttttttggaagttgcgaaagctcaagaagcatgtcatggtaatacttcaaataaagaacagttaactgctactaaaacggagcaaaatataaaagattttgagacttctgatacattttttcagactgcaagtgggaaaaatattagtgtcgccaaagagtcatttaataaaattgtaaatttctttgatcagaaaccagaagaattgcataacttttccttaaattctgaattacattctgacataagaaagaacaaaatggacattctaagttatgaggaaacagacatagttaaacacaaaatactgaaagaaagtgtcccagttggtactggaaatcaactagtgaccttccagggacaacccgaacgtgatgaaaagatcaaagaacctactctattgggttttcatacagctagcgggaaaaaagttaaaattgcaaaggaatctttggacaaagtgaaaaacctttttgatgaaaaagagcaaggtactagtgaaatcaccagttttagccatcaatgggcaaagaccctaaagtacagagaggcctgtaaagaccttgaattagcatgtgagaccattgagatcacagctgccccaaagtgtaaagaaatgcagaattctctcaataatgataaaaaccttgtttctattgagactgtggtgccacctaagctcttaagtgataatttatgtagacaaactgaaaatctcaaaacatcaaaaagtatctttttgaaagttaaagtacatgaaaatgtagaaaaagaaacagcaaaaagtcctgcaacttgttacacaaatcagtccccttattcagtcattgaaaattcagccttagctttttacacaagttgtagtagaaaaacttctgtgagtcagacttcattacttgaagcaaaaaaatggcttagagaaggaatatttgatggtcaaccagaaagaataaatactgcagattatgtaggaaattatttgtatgaaaataattcaaacagtactatagctgaaaatgacaaaaatcatctctccgaaaaacaagatacttatttaagtaacagtagcatgtctaacagctattcctaccattctgatgaggtatataatgattcaggatatctctcaaaaaataaacttgattctggtattgagccagtattgaagaatgttgaagatcaaaaaaacactagtttttccaaagtaatatccaatgtaaaagatgcaaatgcatacccacaaactgtaaatgaagatatttgcgttgaggaacttgtgactagctcttcaccctgcaaaaataaaaatgcagccattaaattgtccatatctaatagtaataattttgaggtagggccacctgcatttaggatagccagtggtaaaatcgtttgtgtttcacatgaaacaattaaaaaagtgaaagacatatttacagacagtttcagtaaagtaattaaggaaaacaacgagaataaatcaaaaatttgccaaacgaaaattatggcaggttgttacgaggcattggatgattcagaggatattcttcataactctctagataatgatgaatgtagcacgcattcacataaggtttttgctgacattcagagtgaagaaattttacaacataaccaaaatatgtctggattggagaaagtttctaaaatatcaccttgtgatgttagtttggaaacttcagatatatgtaaatgtagtatagggaagcttcataagtcagtctcatctgcaaatacttgtgggatttttagcacagcaagtggaaaatctgtccaggtatcagatgcttcattacaaaacgcaagacaagtgttttctgaaatagaagatagtaccaagcaagtcttttccaaagtattgtttaaaagtaacgaacattcagaccagctcacaagagaagaaaatactgctatacgtactccagaacatttaatatcccaaaaaggcttttcatataatgtggtaaattcatctgctttctctggatttagtacagcaagtggaaagcaagtttccattttagaaagttccttacacaaagttaagggagtgttagaggaatttgatttaatcagaactgagcatagtcttcactattcacctacgtctagacaaaatgtatcaaaaatacttcctcgtgttgataagagaaacccagagcactgtgtaaactcagaaatggaaaaaacctgcagtaaagaatttaaattatcaaataacttaaatgttgaaggtggttcttcagaaaataatcactctattaaagtttctccatatctctctcaatttcaacaagacaaacaacagttggtattaggaaccaaagtgtcacttgttgagaacattcatgttttgggaaaagaacaggcttcacctaaaaacgtaaaaatggaaattggtaaaactgaaactttttctgatgttcctgtgaaaacaaatatagaagtttgttctacttactccaaagattcagaaaactactttgaaacagaagcagtagaaattgctaaagcttttatggaagatgatgaactgacagattctaaactgccaagtcatgccacacattctctttttacatgtcccgaaaatgaggaaatggttttgtcaaattcaagaattggaaaaagaagaggagagccccttatcttagtgggtaagtgttcatttttacctttcgtgttgccaatcactatttttaaagtgtttattcagtagacttggtatgctaacaattaagagtgttataaactatgtcttttcagccatttttgtgtagtcagtttgggggagtatggtttgatatacagatacacagattcagtattcgtatacagatttgatatcttggtatacagattcgatatctctgaatctgtataccaagaaatcatgttttaagggtctcaatatattttcaaaaagattattagtataataattgagaaattactgttaaaaagttttgagtttctctagaaaatttgaaactcttaacaaaacctgcataatactaacttaactgttttcatatacatagcaagttcagactctgacttatatgaactttaaaagttggtttccgggaggccgaggcgggcggatcacgaggtcaggagatcgagaccatcccggctaaaacggtgaaaccccgtc

SEQ ID NO: 141 - DNA, 1096 bp, Homo sapiens
ctattactagtactttaatgtaatttgataattgtaaaaagcctcttaactctaattcaaggacctacataataaattactccttcagttaatggctgcccccgtgctgaaaaaaaaaaaaaaaaagagagaaaaagtttatttgaagaaattttgttaggccttattgccagtaaacctagagttatatttagtgtcagtttttcaaaaagtagcttatctgtggtatctggtagcatctgtttatcctatttaggatttatcctgtttagaccctgttaaatagtggtgttttaaagtggtcaaaacagaacaaaaatgtaattgacattgaagactgactttactctttcaaacattaggtcactatttgttgtaagtatttttgtttaacatttaaagagtcaatactttagctttaaaaaaatggtctatagacttttgagaaataaaactgatattatttgccttaaaaacatatatgaaatatttctttttaggagaaccctcaatcaaaagaaacttattaaatgaatttgacaggataatagaaaatcaagaaaaatccttaaaggcttcaaaaagcactccagatggtaaaattagctttttatttatatctgttctccctctataggtatggtatataatattctgacctcaggtgatccacctgcctctcaaagtgctgggattacagacatgagccactgtgcctaatcaaggacctctttatactcttaaaaattactgaggacctaaaagagcatttgtttatgtggaatatatctattgatatttaccatattagaaatgtaaattgattaatgttaaaattagtaatattatgcgttggtcatttggaagatatgagttcactgagttatgcggatcttccgaaagttgacagttttattatgcagtattaaacaatcactttcattgatgccattaccgatcagaaaagtttaagtagtagaaagctgtcaagcttacagagccagatacaagcttcccaaaaattctgattttcatctaaaagcttgaatttttccccggcaataagtattgtcacttatttttcttgtaggtgaca

SEQ ID NO: 142 - DNA, 1070 bp, Homo sapiens
gactccttaatgagtatatagagatcgtcctcattcttttttgtggttacatagtagttgatcatctggctgtgtcagtgtttcctagtttatttaaccaatttccaactagtggacttattgaagatttaattaggttccagttacatactgagaatgaacaatatctaaagcttagcttttaaaccttcataagactaaattttaaatttggtatttgcatcagaaattagctaacacctttgagttatgatggttaacatcaactgactaaatttatgctgatttctgttgtatgcttgtactgtgagttatttggtgcatagtcattatcaatttgtgaatcaatttattttcatagttaacatttattgagcatctgttacattcactgaaaattgtaaagcctataattgtctcaaattttttgtgtatttacagtaacatggatattctcttagattttaactaatatgtaatataaaataattgtttcctaggcacaataaaagatcgaagattgtttatgcatcatgtttctttagagccgattacctgtgtaccctttcggtaagacatgtttaaatttttctaaattctaatacagtatgagaaaagtctcgtttttataaatgaacatttctaaaaataatgacactaacgttaagaagttaacacttcccgttttataaaatttataaaatactttggtagtattttatagtgctgttcatatcattattttattttttaattttatgacagctttgtaaagtagacagattttattctaattttatggatgaagtactaaggttgagaggaattaaggaaattgctccgaatcagttaacaaaaagattgcagatattaaaaatatccttttatctctcctctctaaacctttaaaaaagtactaagatagtttttttaatgtataattcccaaggacaatgatgagaagaaacaacaaaagtttggaagccaaaaacataaaggatttagtaagcatgagaaagctaaaacctgacactagagcaaacagagatgctttcccctaaaaaacctga

SEQ ID NO: 143 - DNA, 1428 bp, Homo sapiens
gtgagtgagaaaataagagtttcaaaggtaggcaagatttttgggctaaataaaaagggcactttaaaaaaggtataaataggtagaagagagaaaagggagcgaggtgggataattgaaagaggggatctcctgtggagactgaggtattaggcggagtagagagttcaggtgaagatgtgaaggtgagagaagaggatgggtagacatttccctggtgaaggaggtaaggagtactatgatggaattagaggggacacactgagagggtccacacttgacagactctcttctattatgtgttatgtgaggtagattgtaaagtcaaaggctagccttgaaaaatgtgatattgttttggaatggcaaccatggtgaatacaaaacagttaccagaatagtatcaccatgtagcaaatgagggtctgcaacaaaggcatattcctaaatatttatatgtgtactagtcaataaacttatatattttctccccattgcagcacaactaaggaacgtcaagagatacagaatccaaattttaccgcacctggtcaagaatttctgtctaaatctcatttgtatgaacatctgactttggaaaaatcttcaagcaatttagcagtttcaggacatccattttatcaagtttctgctacaagaaatgaaaaaatgagacacttgattactacaggcagaccaaccaaagtctttgttccaccttttaaaactaaatcacattttcacagagttgaacagtgtgttaggaatattaacttggaggaaaacagacaaaagcaaaacattgatggacatggctctgatgatagtaaaaataagattaatgacaatgagattcatcagtttaacaaaaacaactccaatcaagcagtagctgtaactttcacaaagtgtgaagaagaacctttaggtattgtatgacaatttgtgtgatgaatttttgcctttcagttagatatttccgttgttaaataatgtcctgatggttttccccctttggtggtggtaattttaaagccctttttaatgttttagattttctaaatccaaagattaggtttaaattattctaatgtttctttcaaagataacttcttgtggacttgttaaaaaaaattagacacacaatctaggactgctgttactggaatatattttctatcatgctactaattttctttttaaaatgtgataaaaatagggccgggcgtggtggctcatgcctgtaatcccagaactttgggagactaaggcgggcggatcacctgaggtcaggagttcaagaccagcctggccaacatagtgaaaccctgtctctactaaaaatacaaaataaataaataaataaataaatagctgagcgtggtggcaggcacctgtaatcccagctgcttgggaggctgaggcagg

SEQ ID NO: 144 - DNA, 1182 bp, Homo sapiens
acaagttgaaacatcctttcatttatgaagaattaaaaggggtaccctttttagagaaaaggagagcatgtaaacttcgaggaaattgatatgtataattttataaaacagggcttgcgcttttttttttttgagacagagtttcgctcttgttgcccaggctggagtgcaatggtgcaacctcggctcaccgcaacctcctcctcccgagttcaagtgattctcctgcctcagcctgctgaatagctgggattacaggcatgtgccaccacacctggctacttttgtgttttttttacttttatatattttttttttgtttagtagagacagggtttctccattttggtcaggctggtcttgaactcccgacctcagatgatctgcccgcctcagcctcccaaagtgctgggattacaggcgtgagccactgtgcctggccaggggttgtgctttttaaatttcaattttatttttgctaagtatttattctttgatagatttaattacaagtcttcagaatgccagagatatacaggatatgcgaattaagaagaaacaaaggcaacgcgtctttccacagccaggcagtctgtatcttgcaaaaacatccactctgcctcgaatctctctgaaagcagcagtaggaggccaagttccctctgcgtgttctcataaacaggtatgtgtttgtctacaatactgatggcttttatgacagagtgtaattttatttcattaactagtatctacaaatggctttgtttaaagaatgaacacattagtgcaggaatggatgaatgaaatcatcatattttctaattagcctgcagtggcagcctctggccccttgctaggcctgcctcatcctgctaaagtgatctgtgcttccaaattactacttcttttcccccttcaaatctttcttattttgtcattgtaaatgctctcagctaggtgttaaagtagtcttactgatattcaaatgtgaataactgatagccctgaaccttctatgagctatttatattttccaaagaggattctccttaagccaatattatctaggtagaattttaggcaatggagaggtgaaaataatattgatgacattaatagctaactttgagcattttctaggtgtaagatgctcttctaagcacttcacatgcattaggtata

SEQ ID NO: 145 - DNA, 1188 bp, Homo sapiens
ctatgattccaaagcaaagagtctgactccagagtcaaactctgaacaaacaaaaagacactttgggttagatatcctggggtgaaagcaagcactttgaaagtaagccaagcctgtgtacagatctgaccacctgaggtcacattccctaaaatacttaaacttctcccttttgtttcccatctaagtttttgaacttaagagattttgtaaaacatcacatttttttatcctcacagtaccttcctatggcagatttagcaggaggcgtataaacggggtggaaaaggtacagcagactgtggaatgtatggatcatttatattacattaaaatttttagtttctagtaaataacttaaatgtttttgtagtgaagattctagtagttaatgaaaatttttggtaaattcagttttggtttgttataattgtttttattgtgtgatacatgtttactttaaattgtttttcttttttgtgtgtgtttattttgtgtagctgtatacgtatggcgtttctaaacattgcataaaaattaacagcaaaaatgcagagtcttttcagtttcacactgaagattattttggtaaggaaagtttatggactggaaaaggaatacagttggctgatggtggatggctcataccctccaatgatggaaaggctggaaaagaagaattttataggtactctatgcaaaaagattgtgtgttaacttttatgtattccctcatccctctttcttctcttaactgtctctcgaactaaaaagttggctagaaatcaaatttttatgcatttaattgttttaagtgcattatggttaagcattctgtagaagtcttttgaaaagtgctgtttgtcctggggtttaatgaactggattttcttgatttgggacatttttcttaggcatttataaatatagcccaatttataaagttaaatttggccgggtacagtggctcatgcctgtaatcccagcactttgggaggccgaggcgggtagatcacctgaggtcaggagttcgagaccagcctggccaacgtggcgaaaccccatctctactaaaagtacaagaactatctgggcgtggtggcaggcacctgtaatcccggctactctggaggctgaggcaggagaatcgcttgaacctgggaggcagaggttgcagtgagccaagat

SEQ ID NO: 146 - DNA, 1171 bp, Homo sapiens
ttgttttgtttttatattttgagatagggtctcactcttgtccaggctggagtgcagtggcactatcatggctcactgcagcctcaacctcctgggctcaagcaatcctcccaccacagcctcctaagtagctgggaccacagatgtgagctaccactcttggctgattttttttattattttttgtagagatgtgggggtctcactatgttgcctaggctggtctcaaacttctggcctcaagcaatcctcctgcctcagcttcccaaaatgctgggagtataggcatgagccaccatgctcagcaatgaagtttttatcagtatgatactttgatacatgtcaaataattttctgaaattatattgtagatcatatgaactcataaaaacttaatgatcttgaacaatgtagtttttgtacagagaatagttgtagttgttgaattcagtatcatcctatgtggtttttatgataatattctacttttatttgttcagggctctgtgtgacactccaggtgtggatccaaagcttatttctagaatttgggtttataatcactatagatggatcatatggaaactggcagctatggaatgtgcctttcctaaggaatttgctaatagatgcctaagcccagaaagggtgcttcttcaactaaaatacaggcaagtttaaagcattacattacgtaatcatatacggcagtatggttaaggtttctgtgtagtctgtgacttccatgtcaaaatgttgcacaagccagttgtcagtgacagttgccatcccacactgctgttctcctgtcatccctagcccccatttaagagagatcacacattcatgcattgcttgcttccctctttccccaccccctccttaacctcttgatgtatgagaagaatatgagttactaatttgatccactatttggggattgctaataaagcatttttgcattttattttttgctttttaaaaataattgatattttaacaatatgaaacaatatattcctagctacaaaatttttaattctcagtatttcttagataaattcagtttttattctcagttattcagtgacttgtttaaacagtggaattctagagtcacacttcctaaaatatgcatttttgttttcacttttagatatgatacggaaat

SEQ ID NO: 147 - DNA, 1355 bp, Homo sapiens
tcaactaaaatacaggcaagtttaaagcattacattacgtaatcatatacggcagtatggttaaggtttctgtgtagtctgtgacttccatgtcaaaatgttgcacaagccagttgtcagtgacagttgccatcccacactgctgttctcctgtcatccctagcccccatttaagagagatcacacattcatgcattgcttgcttccctctttccccaccccctccttaacctcttgatgtatgagaagaatatgagttactaatttgatccactatttggggattgctaataaagcatttttgcattttattttttgctttttaaaaataattgatattttaacaatatgaaacaatatattcctagctacaaaatttttaattctcagtatttcttagataaattcagtttttattctcagttattcagtgacttgtttaaacagtggaattctagagtcacacttcctaaaatatgcatttttgttttcacttttagatatgatacggaaattgatagaagcagaagatcggctataaaaaagataatggaaagggatgacacagctgcaaaaacacttgttctctgtgtttctgacataatttcattgagcgcaaatatatctgaaacttctagcaataaaactagtagtgcagatacccaaaaagtggccattattgaacttacagatgggtggtatgctgttaaggcccagttagatcctcccctcttagctgtcttaaagaatggcagactgacagttggtcagaagattattcttcatggagcagaactggtgggctctcctgatgcctgtacacctcttgaagccccagaatctcttatgttaaaggtaaattaatttgcactcttggtaaaaatcagtcattgattcagttaaattctagaagttttacatttaaattttaaatgcttactaaggatgctcaatttcttagatgtactgataattttagtataaaaagcatattcttcagacagttaaagtttttgtgcagtttttgggaggtccagagatctttcttgagcttaaataatgcatttccaattaaaaagcaaaataaatttgcaccatttgattttggtatctgtagcttgctgccctcttgttctcatagctttgctttgatcagatccctattccactctggattagagaattacattttagtacttttcaaatatgtaatagatacactttttatctctatgtagattttaaactacataacaggactctttgtcatattgaatggtctgcagtattgctatctgaaattaccgataatattgtacattcagattcacttaagaggtaaccttgcagagaat

SEQ ID NO: 148 - DNA, 1156 bp, Homo sapiens
gcttaacaccatgccaggtaccttagtaagtgttcgatgaatatttgctttttgtattagccataatcattctcaggctgctttgtcatttacttgttccacaaattcttagcttccaaaattttggtgatacctcatttcctattctctctagttgcctttgtccatgtagattttttgaggaagcttgggtaaataagtgtattttaaactattatgtttaaatcgaagttccttttatctgttttctaatagaaacatttaaatagcattaagaacttgtagcagtataaacaatatgtttgagaagtactatattgtgaaaatattttcacttttatacagttttttacttatttactgtcttactaatcttcctaagactttttaaagtgaatatttttaaggcagttctagaagaatgaaaactcttatgatatctgtaatagaattgaatacatatttaactactaaatcaatatatttattaatttgtccagatttctgctaacagtactcggcctgctcgctggtataccaaacttggattctttcctgaccctagaccttttcctctgcccttatcatcgcttttcagtgatggaggaaatgttggttgtgttgatgtaattattcaaagagcataccctatacaggtatgatgtattcttgaaacttaccatatatttctttcttttgatacaattaatttgtttgtttgtttgagatggagtttcggtctcttgcccaggctggagtgcaatggcgtgatcttggttcactgcagcctccacctcccgggttcaagtgattctcctgcctcagcctctcaagtagctgagccaccacacctggctaattttgtatttttggtagagaaggggtttcatcatgttggtcaggctgatctcgaactcctgacctcaggtgatccactaatctcagcctcccaaagttctgggattacagatgtgagccactgtgcctggcctgatacaattaacttgaatgttatatatgtgacttttttggtgtgtgtaacacattattacagtggatggagaagacatcatctggattatacatatttcgcaatgaaagagaggaagaaaaggaagcagcaaaatatgtggaggcccaacaaaagagactagaa

SEQ ID NO: 149 - DNA, 1145 bp, Homo sapiens
cctgaccctagaccttttcctctgcccttatcatcgcttttcagtgatggaggaaatgttggttgtgttgatgtaattattcaaagagcataccctatacaggtatgatgtattcttgaaacttaccatatatttctttcttttgatacaattaatttgtttgtttgtttgagatggagtttcggtctcttgcccaggctggagtgcaatggcgtgatcttggttcactgcagcctccacctcccgggttcaagtgattctcctgcctcagcctctcaagtagctgagccaccacacctggctaattttgtatttttggtagagaaggggtttcatcatgttggtcaggctgatctcgaactcctgacctcaggtgatccactaatctcagcctcccaaagttctgggattacagatgtgagccactgtgcctggcctgatacaattaacttgaatgttatatatgtgacttttttggtgtgtgtaacacattattacagtggatggagaagacatcatctggattatacatatttcgcaatgaaagagaggaagaaaaggaagcagcaaaatatgtggaggcccaacaaaagagactagaagccttattcactaaaattcaggaggaatttgaagaacatgaaggtaaaattagttatatggtacacattgttatttctaatatgagaacaaagtcttagagactttgaatttaacatttttaatgagtaaattgtttttattttgagtagtaaattgactttattttttagtatctagggtattcttttttggtgttagacaaagaatagcaacaagggacagaaatatcaggtctaagccatttgtaatatttttcctgaattcttacctatatgatgtggcttttgcatttttgtcatggtagttattagctttcatgtgttattatgcctggaactaggacctattgtggtgtcaattttaatattaaaaatcatggtgttttgatgtttatatgacataaattttattttttcgtatctcccttttgttgttgctgaagattttatgtttttctgcatttcctcatgatttatatagatgtaacatgttctataggacatgtaatttacatgtcctatagaactataagttacatgtcc

SEQ ID NO: 150 - DNA, 1122 bp, Homo sapiens
actctgtatgactttttttttttttaaacatgagtacactggtttcaaaatttcctggaaaacttatagcaggccaggtgtcatgggtcacatctgtaatcccaacagtttgggagtccaaggtggtggatcacttgaggtcaggagtttgagaccagcctggccaatatggtgaaactccgtctctaccaaaaatgcaaaaattaaccgggcatgttggatgtgcctctaatcccagctactcgggaggctgaggcaggagaaccacttgaacccaggagacagaggttgcaatgagccgagatcacaccactgcactcccagattgggtgacagagtgagaccctgtctcaaaaaaaaaaaaaagaaaaaacttttagcagttatatagtttcttatctttaaatctcccttctttgggtgttttatgcttggttctttagttttagttgcttttgaatttacagtttagtgaattaataatccttttgttttcttagaaaacacaacaaaaccatatttaccatcacgtgcactaacaagacagcaagttcgtgctttgcaagatggtgcagagctttatgaagcagtgaagaatgcagcagacccagcttaccttgaggtgagagagtaagaggacatataatgaggcttgatgattattcaaggtgagaagctgttttagactctctggccatcacaggaaggagtatgttgaaatgctgcatttctcaaaagggatgtgtacatttctgggattttcagtgatgtgccagacgagtgtggtggtatgttttcaactatataccgagtagaggatgggagggttctagaattttatatattaattaaatttggtttaaaatgcaggcaaaacttgttttatttttgtccctcctgtactctgaagcaaaaaaacttttttatttttaagataaaacaaatatcttcaaagtaatggcttagtttccatgttcttagctgtttctcaagtccttcctggagtgtacttgataatcctctaccctaagggtacttgggtagaaatgtttccgaagcactaaactgttagaagtagcataggctttagaatcgtggcactctcattttattagcaaagta

SEQ ID NO: 151 - DNA, 1199 bp, Homo sapiens
gtatctactatttcaaagttaatggaattatactcctggggctaagaatgagggttctagggccaacctctactacctatgtggcttgtgcaaattagttgtcccctttgtgcctcagttttacctacaacacagaaacaatgatattacctaccccatggactgttgtgaagattaaatgaattagtacatttactacacatagatctatttctcaaaataatgagcattcagatattagccatctgtaatgtagttggtgatgattatgattattagagtacatttataattggaggatcatttttgccgtagggaaatagaattattaatagtttgaggcacctgagaatattatgtgagaaactgattacattaaccacacccttaagatgagctctaattttgttgtatttgtcctgtttaaagccatctagttacaatagatggaacttttttgttctgattgctttttattccaatatcttaaatggtcacagggttatttcagtgaagagcagttaagagccttgaataatcacaggcaaatgttgaatgataagaaacaagctcagatccagttggaaattaggaaggccatggaatctgctgaacaaaaggaacaaggtttatcaagggatgtcacaaccgtgtggaagttgcgtattgtaagctattcaaaaaaagaaaaagattcaggtaagtatgtaaatgctttgtttttatcagttttattaacttaaaaaatgaccttactaacaaaatgattataaatccagataaagtataaagttagtttatatcagagaagcaaaatccactactaatgcccacaaagagataatataaaagaggatctgtatttattttgaaacaaacatttaaatgataatcacttcttccattgcatctttctcatctttctccaaacagttatactgagtatttggcgtccatcatcagatttatattctctgttaacagaaggaaagagatacagaatttatcatcttgcaacttcaaaatctaaaagtaaatctgaaagagctaacatacagttagcagcgacaaaaaaaactcagtatcaacaactaccggtacaaacctttcattgtaatttttcagttttgataagtgcttgttagtttatggaatctccatatgttgaatttttgttttgttttctgtaggtttcagat

SEQ ID NO: 152 - DNA, 1164 bp, Homo sapiens
ctagttacaatagatggaacttttttgttctgattgctttttattccaatatcttaaatggtcacagggttatttcagtgaagagcagttaagagccttgaataatcacaggcaaatgttgaatgataagaaacaagctcagatccagttggaaattaggaaggccatggaatctgctgaacaaaaggaacaaggtttatcaagggatgtcacaaccgtgtggaagttgcgtattgtaagctattcaaaaaaagaaaaagattcaggtaagtatgtaaatgctttgtttttatcagttttattaacttaaaaaatgaccttactaacaaaatgattataaatccagataaagtataaagttagtttatatcagagaagcaaaatccactactaatgcccacaaagagataatataaaagaggatctgtatttattttgaaacaaacatttaaatgataatcacttcttccattgcatctttctcatctttctccaaacagttatactgagtatttggcgtccatcatcagatttatattctctgttaacagaaggaaagagatacagaatttatcatcttgcaacttcaaaatctaaaagtaaatctgaaagagctaacatacagttagcagcgacaaaaaaaactcagtatcaacaactaccggtacaaacctttcattgtaatttttcagttttgataagtgcttgttagtttatggaatctccatatgttgaatttttgttttgttttctgtaggtttcagatgaaattttatttcagatttaccagccacgggagccccttcacttcagcaaatttttagatccagactttcagccatcttgttctgaggtggacctaataggatttgtcgtttctgttgtgaaaaaaacaggtaatgcacaatatagttaattttttttattgattcttttaaaaaacattgtcttttaaaatctcttatgattagttggagctaccagttggcaaatttgctagctaactagtgatctgaaagtaagcctctttgaacctctgatttttcatgaaaagcaattctctcaattctatattatttcaagggtaacaagttacatcctagtctgtgtacttaattttatagaaattgtccttaattttattttctgcaatttatgttttct

SEQ ID NO: 153 - DNA, 1139 bp, Homo sapiens
aagattcaggtaagtatgtaaatgctttgtttttatcagttttattaacttaaaaaatgaccttactaacaaaatgattataaatccagataaagtataaagttagtttatatcagagaagcaaaatccactactaatgcccacaaagagataatataaaagaggatctgtatttattttgaaacaaacatttaaatgataatcacttcttccattgcatctttctcatctttctccaaacagttatactgagtatttggcgtccatcatcagatttatattctctgttaacagaaggaaagagatacagaatttatcatcttgcaacttcaaaatctaaaagtaaatctgaaagagctaacatacagttagcagcgacaaaaaaaactcagtatcaacaactaccggtacaaacctttcattgtaatttttcagttttgataagtgcttgttagtttatggaatctccatatgttgaatttttgttttgttttctgtaggtttcagatgaaattttatttcagatttaccagccacgggagccccttcacttcagcaaatttttagatccagactttcagccatcttgttctgaggtggacctaataggatttgtcgtttctgttgtgaaaaaaacaggtaatgcacaatatagttaattttttttattgattcttttaaaaaacattgtcttttaaaatctcttatgattagttggagctaccagttggcaaatttgctagctaactagtgatctgaaagtaagcctctttgaacctctgatttttcatgaaaagcaattctctcaattctatattatttcaagggtaacaagttacatcctagtctgtgtacttaattttatagaaattgtccttaattttattttctgcaatttatgttttcttactatttctggtgtatgtgtttatcccattgtgatgttatattggtgtcctcaatttatttccttagccatacactctacttttcattgtacagggctatttattatctcagagtcaagcttttttttttttttttttttccccgagatggagtctcactctgttgcccaggctggagtgcagtggcgctatctcagcccactgcaagttctgcctcccaggttcacacca

SEQ ID NO: 154 - DNA, 1245 bp, Homo sapiens
cctgtatatgagctaataaaagttgcttccaatattttataattataatgtttcagtgagtaaccttgttcataggtgttttcatgaactttatgttcatgtgtattttactattattagaggtctatcttcagagaggagtacaagaaatgggattactgggtgcaaaggtaaatggatatgtgtctttgctaggtattgccaaatttatctccagaaatcttgcacaaatctgtactcctgttagcaatgtgtgcgtatacctgcttccacatgacctcagtaaaagaatgtgttgtcatattggtattgaaattttagcactgtaagcaacaggtcattttggaaaacctgagctttcgccaaattcagctattttgatttgcttttattattagcatataccaaaataaataggcatattagagtttcctttcttgcatcttaaaattcatctaacacatctataataacattcttttcttttttttccattctaggacttgcccctttcgtctatttgtcagacgaatgttacaatttactggcaataaagttttggatagaccttaatgaggacattattaagcctcatatgttaattgctgcaagcaacctccagtggcgaccagaatccaaatcaggccttcttactttatttgctggagatttttctgtgttttctgctagtccaaaagagggccactttcaagagacattcaacaaaatgaaaaatactgttgaggtaaggttacttttcagcatcaccacacattttggtatttttctattttgacagtccagtatcaaggaaatagcttttatacaaattggatagttgaggtagtatgtgaggtaaagtttaatcatatattaattgcccatgaacctcaggagatgggggaatggggaaatgacagcaactagaaagagaagaatgacttgaagggaaatgagttaggagaaattgtgagaaggatgttcagaaatgcagactttgtaagcaaactggaaattggttacaagaataatatgagttatctgtggtttgcagcagtcagcagtgtgattagttaataatatagagactacaggtttacatttaaactccatatctagtgttttatacagattatatttctttgacttgatttaatcccagataagagacactgatattattttccctagatcatgtatgcattttctgcttaaatctatatatacattatataatattagctg

SEQ ID NO: 155 - DNA, 1147 bp, Homo sapiens
atatttgaccagttgtgatttctcaagcaacagtttcatgtagtttaacctataaatcatttcaattaattcttggaacagacgtgaggtaggtgaggcaattctttcttttctctaaccaaagaagtacctttatagatgtgagatgattcccagctattaagtagtaaatagagctaggacttgagccccaatcttccagcttcaatccagatcatatgacagcttgctgattaaactagatgacagagaagatctctttccttcagatacacatactttttctctgttcccctctccctatcagctagattcccctaaatcactgatactggttttgtaattttgcatcggcatgtttgacaattggtatcacatttagggtttttcattcttttttggtccaaacttttcatttctgcttttaaaggaaatacttttggaaacataaatatgtgggtttgcaatttataaagcagcttttccacttattttcttagaatattgacatactttgcaatgaagcagaaaacaagcttatgcatatactgcatgcaaatgatcccaagtggtccaccccaactaaagactgtacttcagggccgtacactgctcaaatcattcctggtacaggaaacaagcttctggtaagttaatgtaaactcaaggaatattataagaagtatatatggaggccatcgtatattctgttgtatacctagtaaacatggtaaaatgtaattaaacttaattagaaaatgtggttgttatgtggctcctgtaagtatagttatttagaaattttatttattgaagcaagatatgaaactctgggtgcacactttccaaacaggtgctttcatttacatgtgattgaaaagtgttttttgtcatttatttcactgttccatacaattagggttgtttctaagctgtttgtaagctgtttctaagctatttaagtggttaaatcacagtagatgcaaatcaagctaaagtctttaacattggctaatggctgattcttaaatagctaatacttgctaagggtatctatattaactcatttaatcctcataacaaccctatgagataaaacctaagtcctcacttaacattgtcaataggtttttggaaactgatttta

SEQ ID NO: 156 - DNA, 2511 bp, Homo sapiens
acagtttccgagaacctatcaattatgttaagtgaggacttgactctattatcctgattttgtagatgaggagactgtggcatagagagaggttaagcaattgcctaataaggtcacaaagctagaaaagtaggtattagaacccagatagtgtgtgttctcaagatggctttaaaatatttatctttgtttaatctgttaataataaaaaacaaaagattaaagcataagtgacgtcccctacctccttttttatcttttactgtgattattcttcatcttccttccttttcatgtcattttatatgttcttatgtaaaattactttcatctagaataggaataatgtgaactgaaatcacctaacctattaggagttaggggagggagactgtgtgtaatatttgcgtgcttaaatattttcaatgaaaagttactttgatttagttttttatgttactacataattatgataggctacgttttcatttttttatcagatgtcttctcctaattgtgagatatattatcaaagtcctttatcactttgtatggccaaaaggaagtctgtttccacacctgtctcagcccagatgacttcaaagtcttgtaaaggggagaaagagattgatgaccaaaagaactgcaaaaagagaagagccttggatttcttgagtagactgcctttacctccacctgttagtcccatttgtacatttgtttctccggctgcacagaaggcatttcagccaccaaggagttgtggcaccaaatacgaaacacccataaagaaaaaagaactgaattctcctcagatgactccatttaaaaaattcaatgaaatttctcttttggaaagtaattcaatagctgacgaagaacttgcattgataaatacccaagctcttttgtctggttcaacaggagaaaaacaatttatatctgtcagtgaatccactaggactgctcccaccagttcagaagattatctcagactgaaacgacgttgtactacatctctgatcaaagaacaggagagttcccaggccagtacggaagaatgtgagaaaaataagcaggacacaattacaactaaaaaatatatctaagcatttgcaaaggcgacaataaattattgacgcttaacctttccagtttataagactggaatataatttcaaaccacacattagtacttatgttgcacaatgagaaaagaaattagtttcaaatttacctcagcgtttgtgtatcgggcaaaaatcgttttgcccgattccgtattggtatacttttgcttcagttgcatatcttaaaactaaatgtaatttattaactaatcaagaaaaacatctttggctgagctcggtggctcatgcctgtaatcccaacactttgagaagctgaggtgggaggagtgcttgaggccaggagttcaagaccagcctgggcaacatagggagacccccatctttacaaagaaaaaaaaaaggggaaaagaaaatcttttaaatctttggatttgatcactacaagtattattttacaagtgaaataaacataccattttcttttagattgtgtcattaaatggaatgaggtctcttagtacagttattttgatgcagataattccttttagtttagctactattttaggggattttttttagaggtaactcactatgaaatagttctccttaatgcaaatatgttggttctgctatagttccatcctgttcaaaagtcaggatgaatatgaagagtggtgtttccttttgagcaattcttcatccttaagtcagcatgattataagaaaaatagaaccctcagtgtaactctaattcctttttactattccagtgtgatctctgaaattaaattacttcaactaaaaattcaaatactttaaatcagaagatttcatagttaatttattttttttttcaacaaaatggtcatccaaactcaaacttgagaaaatatcttgctttcaaattggcactgattctgcctgctttatttttagcgctatcacaggacccagagcctatgcccttttaaacttaccacaaaagcagaagattaattcaatttaagatgatactctcatttgttacgtcctttttttttttttttggagatggagtcttgctttgtcgcccatgctggagtgcagtggcatgatcctggctcactgcagcctccacttcccgggttcacgtaattctcccacctcaagcctccctagtagctgggattacagggacgcaccaccatgcccagctaatttttgcatttttagtagagactgggttttaccatgttggccaagctggtctcaaactcctgatgtcaggtgatccatctgcctcagcctcccaaagtgctgggattataggcgtgagccactgtgcccggccaatatttgttactttcttaggtttaatagagaaaagggataaaacatttctaactgggagttaattgcatggagaaggtcttaaatc

SEQ ID NO: 157 - DNA, 1500 bp, Homo sapiens
aatctttggatttgatcactacaagtattattttacaagtgaaataaacataccattttcttttagattgtgtcattaaatggaatgaggtctcttagtacagttattttgatgcagataattccttttagtttagctactattttaggggattttttttagaggtaactcactatgaaatagttctccttaatgcaaatatgttggttctgctatagttccatcctgttcaaaagtcaggatgaatatgaagagtggtgtttccttttgagcaattcttcatccttaagtcagcatgattataagaaaaatagaaccctcagtgtaactctaattcctttttactattccagtgtgatctctgaaattaaattacttcaactaaaaattcaaatactttaaatcagaagatttcatagttaatttattttttttttcaacaaaatggtcatccaaactcaaacttgagaaaatatcttgctttcaaattggcactgattctgcctgctttatttttagcgctatcacaggacccagagcctatgcccttttaaacttaccacaaaagcagaagattaattcaatttaagatgatactctcatttgttacgtcctttttttttttttttggagatggagtcttgctttgtcgcccatgctggagtgcagtggcatgatcctggctcactgcagcctccacttcccgggttcacgtaattctcccacctcaagcctccctagtagctgggattacagggacgcaccaccatgcccagctaatttttgcatttttagtagagactgggttttaccatgttggccaagctggtctcaaactcctgatgtcaggtgatccatctgcctcagcctcccaaagtgctgggattataggcgtgagccactgtgcccggccaatatttgttactttcttaggtttaatagagaaaagggataaaacatttctaactgggagttaattgcatggagaaggtcttaaatcagatgttttaatgccttaaatgtctgtataatatcatgttttcaaatctaattataaatacgtttaaagccaagaataaatcttttaaaaaattgacttgtttccttccataactctgagccatgatttttctgttctgtaaaaagcattaacaaaattgtctattttgctactccctgtaacttaagtattctgcaagtcttattaatgagacttgttttgtttctaaaacagtttggttttcacatcctaattttgcagtgatccactctagaacaaggaataaaacttgggtttcaaacaggagaacagaaaaaattacaagaatttaaccttttcttttttgaatccttggtacaactgctattgtctgttctcatgtagaacacccattatgttgatagatatgtaatgcgcacacttttttataaattataaataacatccaagctacatgaaacaaaatatgaagcttgagtatatgtgcatattatcccctc

SEQ ID NO: 158 - DNA, 8166 bp, Homo sapiens
gctattgggcgctgggagtcgagggggcgggaggcgggaattcgtctcgggttgtgtggttgaggggtctggtgggtcgaggaaaggtaacggcggccccagtcctgcacacaaggccggggaagtagcagcacccccaggaagagggaggaggaagggctcgtgccctttcttctcttccagggctccgctttatttgctctcagaagtcggtttcctttccttttcttcagtgaatcggagctcagagcgttgcttcggtttccctccagacagttaggaatctgaaataaacaggaaagcactatgtcttcaatgtggtctgaatatacaattggtggggtgaagatttactttccttataaagcttacccgtcacagcttgctatgatgaattctattctcagaggattaaacagcaagcaacattgtttgttggagagtcccacaggaagtggaaaaagcttagccttactttgttctgctttagcatggcaacaatctcttagtgggaaaccagcagatgagggcgtaagtgaaaaagctgaagtacaattgtcatgttgttgtgcatgccattcaaaggattttacaaacaatgacatgaaccaaggaacttcacgtcatttcaactatccaagcacaccaccttctgaaagaaatggcacttcatcaacttgtcaagactcccctgaaaaaaccactctggctgcaaagttatctgctaagaaacaggcatccatatacagagatgaaaatgatgattttcaagtagagaagaaaagaattcgacccttagaaactacacagcagattagaaaacgtcattgctttggaacagaagtacacaatttggatgcaaaagttgattcaggaaagactgtaaaactcaactctccactggaaaagataaactccttttcgccacagaaaccccctggccactgttctaggtgctgttgttctactaaacaaggaaacagtcaagagtcatcgaataccattaagaaggatcatacagggaaatccaagatacccaaaatatattttgggacacgcacacacaagcagattgctcagattactagagagctccggaggacggcatattcaggggttccaatgactattctttccagcagggatcatacttgtgtccatcctgaggtagtcggtaacttcaacagaaatgagaagtgcatggaattgctagatgggaaaaacggaaaatcctgctatttttatcatggagttcataaaattagtgatcagcacacattacagactttccaagggatgtgcaaagcctgggatatagaagaacttgtcagcctggggaagaaactaaaggcctgtccatattacacagcccgagaactaatacaagatgctgacatcatattttgtccctacaactatcttctagatgcacaaataagggaaagtatggatttaaatctgaaagaacaggttgtcattttagatgaagctcataacatcgaggactgtgctcgggaatcagcaagttacagtgtaacagaagttcagcttcggtttgctcgggatgaactagatagtatggtcaacaataatataaggaagaaagatcatgaacccctacgagctgtgtgctgtagcctcattaattggttagaagcaaacgctgaatatcttgtagaaagagattatgaatcagcttgtaaaatatggagtggaaatgaaatgctcttaactttacacaaaatgggtatcaccactgctacttttcccattttgcagggacatttttctgctgttcttcaaaaagaggaaaaaatctcaccaatttatggtaaagaggaggcaagagaagtacctgttattagtgcatcaactcaaataatgcttaaaggactttttatggtacttgactatctttttaggcaaaatagcagatttgcagatgattataaaattgcgattcaacagacttactcctggacaaatcagattgatatttcagacaaaaatgggttgttggttctaccaaaaaataagaaacgttcacgacagaaaactgcagttcatgtgctaaacttttggtgcttaaatccagctgtggccttttcagatattaatggcaaagttcagaccattgttttgacatctggtacattatcaccaatgaaatccttttcgtcagaacttggtgttacatttactatccagctggaggctaatcatatcattaaaaattcacaggtttgggttggtaccattgggtcaggccccaagggtcggaatctctgtgctaccttccagaatactgaaacatttgagttccaagatgaagtgggagcacttttgttatctgtgtgccagactgtgagccaaggaattttgtgtttcttgccatcttacaagttattagaaaaattaaaagaacgttggctctctactggtttatggcataatctggagttggtgaagacagtcattgtagaaccacagggaggagaaaaaacaaattttgatgaattactgcaggtgtactatgacgcaatcaaatacaaaggagagaaagatggagctctcctggtagcagtttgtcgtggtaaagtgagtgagggtctggatttctcagatgacaatgcccgtgctgtcataacaataggaattccttttccaaatgtgaaagatctacaggttgaactaaaacgacaatacaatgaccaccattcaaaattgagaggtcttctacctggccgtcagtggtatgaaattcaagcatacagggccttaaaccaggcccttggtagatgtattagacacagaaatgattggggagctcttattctagtggatgatcgctttaggaataacccaagtcgctatatatctggactttctaaatgggtacggcagcagattcagcaccattcaacctttgaaagtgcactggaatccttggctgaattttccaaaaagcatcaaaaagttcttaatgtatccataaaggacagaaccaatatacaggacaatgagtctacacttgaagtgacctctttaaagtacagtacctcaccttatttactggaagcagcaagtcatctatcaccagaaaattttgtggaagatgaagcaaagatatgtgtccaggaactacagtgtcctaaaattattaccaaaaattcacctctaccaagtagcattatctccagaaaggagaaaaatgatccagtattcctggaagaagcagggaaagcagaaaaaattgtgatttccagatccacaagcccaactttcaacaaacaaacaaagagagttagctggtcaagctttaattctttgggacagtattttactggtaaaataccgaaggcaacacctgagctcgggtcatcagagaatagtgcctctagtcctccccgtttcaaaacagagaagatggaaagtaaaactgttttgcccttcactgataaatgtgaatcctcaaatctgacagtaaacacatcgtttggatcatgccctcaatcagaaaccattatttcatcattaaagattgatgccacccttactagaaaaaatcattctgaacatccgctctgttctgaagaagccctggatccagacattgaattgtctctagtaagtgaagaagataaacagtccacttcaaatagagattttgaaacagaagcagaagatgaatctatctattttacacctgaactttatgatcctgaagatacagatgaagaaaaaaatgacctagctgaaactgatagaggaaatagattggctaacaattcagattgcattttagctaaagacctttttgaaattagaactataaaagaagtagattcagccagagaagtgaaagctgaggattgcatagatacaaagttgaatggaattctgcatattgaagaaagtaaaattgatgacattgatggtaatgtaaaaacaacttggataaatgaactggaactgggaaaaactcatgaaatagaaataaagaactttaaaccatctccttccaaaaataaaggcatgtttcctggttttaagtaataatacttaactctcaagctaagtaaaaatatgtcatcatgcttatgttaaactctgttgtaagtaataatttgtaaattgaataagtggcatactttttaaaaaactattttatgttcagaaatgtaaatgttattattcttgagtttttgggtttttttttttgagacagagtcttggtctgttgcccaggctggaatgcagtggtgtgctctgggctcactgcaaccttcacctccaggttcaagtgattctcctgcctcagccttctgagtagctgggactacaggtgtgcaccaccatgcccagctagtttttgtatttttagtagagatggggtttcaccatgttggccaggctggtctcgaactcctggcctcgtgatctgcccttctctgcctccctaagttgctgggattacaggtgtgagccacagtgcctggcccattcttgagttttgataaagtaattcatacaaagtactgtcctcaaataagtcttccttagctaaatgcaatttaaaattattcaaagatcctagggcacttctagtttcacgtaaatattcatattaggtggttctcttcatccatttgttttcacactgatacataaaaattaacagcagtctaatctagtgacacctcagtcatatttcgctatagattttacctcaaatcagtccaagactttttcagagatcaccatttgtcttgaaaggtttatttcgttattaaactgcctacttataagtaattaagagaaattaagaaagtagtatgcatttttaattgaaattgttttacattctttgtataataaacctaaaaccaaacatgtcataaacaaattgacgtaaagatataaaatgccaaatgaagtattccaaattttctattctaattatttagcttcaccatcattgtggaaaaaaatactagatcctgcttagtattatatatttttcctagtggatcagtgagtaataagtaccaaacactagactagaaggtaatttctacattgtttagaaagggtgaaacaatttatcccctctggtattgttctagcataagctttagttatacaatgattaagatagaaaacttcatatataaatttgataagcaaacccacatttatagctgcagctaaaatatgtttccttagggcacagtaatcctttctgtgaattttgaccttgtttgtgtttttgtgaatgaagctatatgtctaatcaaaaatgattataaaagaggctcatctctgacatcattccaaaaatacattcattgatctctttttaagaaacatctgttattcactgggcattgggactttttgtgagtaatttgaattgaaattttatgagctatccaagaattctgtatggtctattattttcaagtcaaaatttccagtaaggatttactttacatttcatttggataaatgaatcattatataggtatgtctttgcttccattttgagacatttagatttttacagcctgtttctatagcatttgatgttacaactctaagcgtagttcaaagacatttaaattgacaagttaccagttaaagaatttagaatatattagatcccatctagtattatatattttttctagttgatcattgagcagtaaataccaaatactcgattagaaggtaatttttacattgttttgaaagggtgaaacaatttatctcctctggtattattcttaaaccacagatagggatagtagggtagtgaaacgaataaatacctggtagaagacaagagacttgggctctacacctggctctgccactgatttgctaagtcatattggcaatcaccacacccttcagggaattagtttcatctgtaaaatgcagcggttagtactataaaatcatacaaatttctttgtgctttgagaatctataaaggaatgtctgttgatattctgagtcgattttcatttgcttttgttccagaacggttaaaataaagcatattatttcatttaaaaagtaaagtggctcttactcatttacatttagggaacgatggtgacgtggtttggctatgtccccagccagatctcatcttgaattgtagttcccataatcccgacgtgttgtgggaaggacccagtgggaggtaattgaatcgtgggggcggttaccctcatgcggttctcgtgatactgagttcttatgagacctgatgattttataaggagcttttccctgcttcactctcattcttctctcctgctgccctgtgaaaagttgccttccgccatgattgtaagtttcttgaggcctcctcagtcatgcagaactgtgagtcaattaaacctctttcctttataaattacccagtcttgggtatgactttattagcagcatgagaacagactgacacagatggtatatgtgcataataacttggaaagctagatatttattttcgcaatgctacaattaaaacattttgaggacttttaaaattacctttagggccaggcgcggtggctcacgcctgtaatcccagcactttgggaggccgaggcgggcggatcacgaggtcaggagatcgagaccatcctggttaacacggtgaaaccccgtctctactaaaaatacaaaaaattagccaggcgtggtggcgggcgcctgtagtcccagctactcaggaggctgaggcaggagaatggcgtgaacccgggaggtggagcttgcagtgagccgagattgcgccactgcactccagcctgggcgacagagcgggactccgtctcaaaaaaaaaaaaaaaaagaaattacctttagaattggtaaactacatgagaaaattaagcatattattcatatcttagtgttattacccaacttcatctccaatactttcccctttccctagctagatatgtttttgtttgtttgttttagacagtcttgctctgtcgctcaggctggagtgcaaaggcacgatcttggctcactgcaacctctgcctcgcaggttaaagcgattctcatgtctcagcctcctgcgtagctgggattacaggtgtacaccactgcacccagctaatttttttttttttttttttttaagtatcgacagggtttcaccatgttggccaggctggtctcaaactcctgacctcaagtgatctgcccacctcggcctcccaaagtgttgggattacaggcgtgagccaccatgcctggcctagatattttttattctttccaaaatttaattctccctgaagttaaaaattttcattactgagaatgtacatagagatgtgtcacaaccctttagtaattccaaaaggtgtttcaaaaattttatacaatgataatcactgttgaaacaggtgtatattctcctcagatcatgactgaccaagatgatattccaagaagtaaactactggcctttatagagtaggatgtaggccattttcattactgataacatacttttaaaagaaatgtttacagatttaaataagttaaaacatctaaatgcttttaaaagagcacctggcacattgcaagttattcattattaattagtagatgaatcatatatctggagtgcacccttgctctatatgaaagcttccctaactatagatatataggtgatagactgacaataaagatttgaggaaagaaaaattatttggctggcttattttttaagcttttgagatgtataaggtagagattgtttatcaaataatttatgtgacacattcaatgcatatgaaataattatctaatactgaatttattcaaggactgaaagtatatagagcacacaggctgcaaaccaggaaaactaccagttagagacagggctttattcttggaataaaggtacaatgtaaagagtagatgtttcatgacttgattaaattatttaaaactgtctagaattgtgttataaaactattactatgtttctatgcacttagttattacatgggtttaaatttggcactgtttctaagtttctataaggctttgttgttaagatctttctattcaaaacattaattttaacaaaaagcttttccccgttatttttctgcaa

SEQ ID NO: 159 - DNA, 8166 bp, Homo sapiens; identical to SEQ ID NO: 158

SEQ ID NO: 160 - DNA, 1500 bp, Homo sapiens
actgggaagttcataatttttttcagtattaccaatagatattattgtcaattgcggtatcacattttctttcgtttagattacgtctttaggataaatatctggagctcagattactaggtcaaagggtagagtttatttttatgactacaagttttgtcatttttggtaagatatatcacaattgacaatgaggcaaacaaatcaactagccccctcctgctctttcttcccagcaaactccttccccaaactagttacttgaatttgagaaacagtatgaggttttgccttttggagacattattatttgagccaagtttaggttatacagattttttaaaaaaataacatgatttggcaagatcatgatgaacctccttttctttgagtaaattaaagtactactggcaaataataaactggtcttaggagggatggaaggcggataagccttaatggaagtagaagtgatctgatactggagaccctgagagcttgtctctggcttattttagcatccgggaaagccttgaatattatgaaagatagattgtagcccgatgtcacagagccttcttacttaagtttggctcagcagtctggcaattcccgcctgagtcttcgctatcctggctactgcaaagctgggtaatttaaattgagtggcactgataaatgctcaaagaacttggcaaagcttaaagatacttcctttccgctggtctacggacgtgaagaatgagacttccagtttccaaggaatttgctgcatagactctatcgccggtttcaaaagtcaaactgagacgactttctactttaaacaaacactagggatttgctggagtggcgacaaccttccgccgcgtaccttgagcccttgtttttttttttttttttcggagacttccattggatgccgaagttctcgccccctcacctcgcaccgggactggttgattcctggccttggcgggtgattggtcgagctcgctgggctattgggcgctgggagtcgagggggcgggaggcgggaattcgtctcgggttgtgtggttgaggggtctggtgggtcgaggaaaggtaacggcggccccagtcctgcacacaaggccggggaagtagcagcacccccaggaagagggaggaggaagggctcgtgccctttcttctcttccagggctccgctttatttgctctcagaagtcggtttcctttccttttcttcagtgaatcggagctcagagcgttgcttcggtttccctccagacaggcaagtcggagggaagtccacggaaagggcttgagttcttctgcacagcctgcgggcccatgggtggtgactggatcaccagggtctcggggatctcaactggctgggggaggagggagatacggggcagaaaacctgaggagggagcctatccttacctcctttgagcgcaggcctgttcttagcccgggcgctgcgttaattcttggcgggaggcagagggg

SEQ ID NO: 161 - DNA, 1276 bp, Homo sapiens
gtctctggcttattttagcatccgggaaagccttgaatattatgaaagatagattgtagcccgatgtcacagagccttcttacttaagtttggctcagcagtctggcaattcccgcctgagtcttcgctatcctggctactgcaaagctgggtaatttaaattgagtggcactgataaatgctcaaagaacttggcaaagcttaaagatacttcctttccgctggtctacggacgtgaagaatgagacttccagtttccaaggaatttgctgcatagactctatcgccggtttcaaaagtcaaactgagacgactttctactttaaacaaacactagggatttgctggagtggcgacaaccttccgccgcgtaccttgagcccttgtttttttttttttttttcggagacttccattggatgccgaagttctcgccccctcacctcgcaccgggactggttgattcctggccttggcgggtgattggtcgagctcgctgggctattgggcgctgggagtcgagggggcgggaggcgggaattcgtctcgggttgtgtggttgaggggtctggtgggtcgaggaaaggtaacggcggccccagtcctgcacacaaggccggggaagtagcagcacccccaggaagagggaggaggaagggctcgtgccctttcttctcttccagggctccgctttatttgctctcagaagtcggtttcctttccttttcttcagtgaatcggagctcagagcgttgcttcggtttccctccagacaggcaagtcggagggaagtccacggaaagggcttgagttcttctgcacagcctgcgggcccatgggtggtgactggatcaccagggtctcggggatctcaactggctgggggaggagggagatacggggcagaaaacctgaggagggagcctatccttacctcctttgagcgcaggcctgttcttagcccgggcgctgcgttaattcttggcgggaggcagaggggtgtgtttatcctttatgcaatgtttgggggaagctaccccattttgacactattgttgccacagccggggtacaggacgggctgatttctagattatatctgagtaactaggccagcgttgagttgttgattcatattaagaggttagattccaccatacctcattctcagagctttacagatagaatcgcaaaatgttagagctggaaaataccctagaataatggttcttcttttggagcacacaagcagtggtgaatgttattattggcttca

SEQ ID NO: 162 - DNA, 1123 bp, Homo sapiens
tcttctaactggaggactgcagaaaggggtaacacaaaggggaagaactggagaaagagtgatgctacggagttgtagagagagaggcctcaggaacttatttgtttctgtaggttgattacatctgatctaactgttacaagagctcatgtttaatctggtatgtactttatcatatttgcacattatttcacttaatcattaccacaatcctatggggtacatgcagtcactgtggcttagagaaggtaactaactttcccgaagtcacacaactaatacctggcagagtgaaggatacaaatctagatttgttagactctaagacatgctcttgaccgctgtgatttataagactaggaaattattttgtttccatttgttttgtttatacttttattaattccagtttctgtttccagatttctcccttagttttggttctctggttttctttgtaaggcgtgtctcaatatttgacattttcatttctgttgtagttaggaatctgaaataaacaggaaagcactatgtcttcaatgtggtctgaatatacaattggtggggtgaagatttactttccttataaagcttacccgtcacagcttgctatgatgaattctgtaagtatttttcagcagttaagtttttattaagatatagatacttatgacccataaagtacattgagtatttgactgcattcatattctcagtaaatggagaatattttctgggttcacttggaagaatatctaacctctgggaaactactgattgcagctaaactgtatatatctgtggttaaggcaaagaagaacattctgaaaaatgttctcagctcatttggaatttctatacttttaatgaaaaactgctatacttttaagtaaaaacagagtatttactatcttttacacagaatactatttttctcaccattgttttgtttggatcatgtagaaaattaatatacaaatttgagtaaaccagctttccagttttgttacagctattttgccatatgtacttcatatcttatttactggtaacaagattattagtatcctgaatttgttcttttcctttcctagccatgtttttatacttttattacatatat

SEQ ID NO: 163 - DNA, 1112 bp, Homo sapiens
gattacaagcgtggctgctgctgtgaactttcttatgcatgtttccttgtgttcatgtgggaaaggttttgggtgtacacatagaactggacttgctggagctgggcatcttcactttataagaaattgtttatttctctaccaagtagttgtaacaatttgtactctcactagcagtatccttcattaagttttcatcaaatatattgataggtagtaatgtattctggttttacagaaatcattgatgcttgcataattctggcacagattcctcttttcatttcttctcttgtgcttgatattttagtaagataatcttagggagaggtgtaaaggaatacagtttggatttaactaaatatgagttccttctgctattgttgtgttccctggagtgcaatctcacttttccttgctgttctatttaaacttcagatggagagagacctttataaagttaatatgtttattattttcattggtttctgtgttcatagattctcagaggattaaacagcaagcaacattgtttgttggagagtcccacaggaagtggaaaaagcttagccttactttgttctgctttagcatggcaacaatctcttagtggtaagtagttgcttgatatcttcaggttacttactgggatctgagaaaatataatacagtattctttatccagactggttcagccatgctgtcgctaacttaaatatttgtttaaagatgtttctttgaaataagttataaatcttccaaaagagtttcaatatagcaaaatatgtttaattaatgctaaaatagtattgaacataatttagtcttttgatgagtcggaaagtacataaagacttggcagcctgggcagcatggtgataccccatctctacaaaaattgacaatcaattagccaggcatggtgatgtacacttgtagtcccagctacttgggagactgaggtggtaggatcgcttgagcccaggaggtcgaggttgcagagagctgtgattgtgcactccagcctgggtgaaagaaaacaaacaaacaaagttttggatgcttagagttattataaaaataattagatgataatttgtatgtaaaagatg

SEQ ID NO: 164 - DNA, 1174 bp, Homo sapiens
tggtttttgaaacagagtcttgctctgtcgcctaggctggagtgcagtggcatgacctctgctcattgctacctctgcctcccaggttcaagcgattctcctgcctcagcctcctgagtaggtggtattacaggcgtgcactaccacgcctggctaatttttgtatttttagtagagacagggttttaccatattggccaggctggtctcaaactcctgacttcaattgatgtgcctgcctcggcctcccaaagtgctaggataacaggcgtgagccactgtgtccaaccaaatgtttttggcttatttctctcctgtcctaatttgatgctgcagataaagtgaccagcttgtccaggtttgccaggtaccttcctggtgttagccctaaaaatcttttatcttaggaaacctcccaatcctgggtgaactgggctgtagagaatgattgatgtttatttaattagatatattataaatagatgttctttcatttttagggaaaccagcagatgagggcgtaagtgaaaaagctgaagtacaattgtcatgttgttgtgcatgccattcaaaggattttacaaacaatgacatgaaccaaggaacttcacgtcatttcaactatccaagcacaccaccttctgaaagaaatggcacttcatcaacttgtcaaggtaatttatattttgcctgggtcagttgatatctgtaataagagtcttaattattactgttataagccctaatttatataagtttggttagcataactgattatatatctctatctagtttctctggaatgattttaaaatagcacagagtggtcaaaaatccatagacgtttttaaattcttggtttgacttttaatttattgagacattttgttgtcctaaataattttttaaggaaggcaaggcaaaataaatgattttccaaaattgatgttatttgtagccattattgttaattatatgttagaattctataaaacaatgtttgtatcctaagacgaaatctaattagcctcattgattcattcttgataagtttgcctggccttctgaggccagtatcctacataagtatcaggtatgtttatgtgtgatctttaaataatttttactaattttagagaaatacattaagagtaacataagattattaataata

SEQ ID NO: 165 - DNA, 1128 bp, Homo sapiens
tgggataattaatgttatttggtgattaagaggtcctggatgaccttgagaaggagctttcaggattatgggattaaaagacagattatatgagcttgattctataatcaatggttttgctctaaagaacgtggagaaacttagtagggaagaaacgttgatactgtaaagaaagatttttacagacatgaaatatattttcttcagagatccttgcagttatacattttaaatcatgttattgggagtagtctacaagtacataaggcgatttaaaaaatcaaattggacttttcctattgaaagcatgtttctcagaatctttggtaaagtaaactgaatggtagagaagtactttttaaacatgtttaagtttcatgttttagattatggtatgaaatttctagaaataagccttacatcctggttccagttttcttctagaaaaattgcctacctgtaagttatttatgctgttttttttaaattacttatataagactcccctgaaaaaaccactctggctgcaaagttatctgctaagaaacaggcatccatatacagagatgaaaatgatgattttcaagtagagaagaaaagaattcgacccttagaaactacacagcaggtaaacagagtttattggcagtaaataacccagttagttacagctgaacatggtagtcaagtatcatgtttttaatgcacttgtggagattagttgggtcatgtgacagccataaattaataatttgttgtaatttcattttgtagagttacttgttacaaaggagtttattatagcagattattcacagtaacatgtcgttcaagtgaaactgcatggtgtttcttatatatgaggaatttgatagtaaaatatttacttaaggcatatcttagtgatatactactttgtactttttaactcctccattgtttttatcttaaaatagcatttccttttggctaaaatacctttgatatgattattcatgttatggatattttggaattgatagttttaatgtaatgacaagatgtattcttactgagtttttaagattgatacatgataaaatatgtatatttatttctaaaaattactaaaaggcttgaattaccaga

SEQ ID NO: 166 - DNA, 1120 bp, Homo sapiens
caacttggtttatcaaatatctagtaagtaacagtgataatagtaatcgagtaatttattccatcctgtaggaaatcatgactgtttacattaaaagttttattctgagttcttttcaatgtagaattatgcttaaattttgatttacttttattttccaattagatataagattggactttccaatattgctatatttgatgtccatatgatgggactattttatgagaagttcattttacaatactctaattttgatacatcactaattaaagatagtttggctaagattcatgagtcactactatgttctatttcctttaagtgttgtaatgaggtgcttatttgcatttttaaaatttcttttattattgcctgttagaaatagtctttttttggatgcaggaaaaaaatacatagagctgttttggcctttgagaacaactagccagttaaacttctagttcaccttaaacttcattttggttctgtgtttacagattagaaaacgtcattgctttggaacagaagtacacaatttggatgcaaaagttgattcaggaaagactgtaaaactcaactctccactggaaaagataaactccttttcgccacagaaagtatgtattaatgccattgttcagttttaaagaaggaagatatggaattttctaaaccaatttttgacaaaagaggaacaatagtataatacaaaggacagtagcaacccactcagaagtcctcaatgctgtcacatctctgttactaatgtgtgagatggcaaagcctattctctctatgcctcgtttccttatttataaaataagagaattggactagagagagatctgaaagtcatttttttctgttctgtattttaatgtttgtaaattctccaactccttacagttctttcaggattcttagggcaacagttctcaaggagtagtccaaggagttctagatattgagatttttttggggagtgatctgtgaggtgaaaattatttttgtaataatattaagatgttgtaggccaggcgtggtggctcacgcctgtaatcccagcactttgggaggccaaggcgggtggatcacttgagttcacgagtttgaaacc

SEQ ID NO: 167 - DNA, 1291 bp, Homo sapiens
atcctttagattcaacttgataattctattcttttgtaaactatatttaaaagtgcttcaaaagcattggtgtattaaggaatatttgaatgaactatgctgtgaacaaaactattaactctaaactataatatcacaagttcgtatgaagcctaagaaaaaattaaaattgttcctactttgttttatcatttttataatttatgaaagaggagagttaaaatgtactcaaaacatttggaattggagagttagagtggtatgttggaaagaatgcaaatttggaaatatcatttataacttttaaaagaaagaatgaggaccaattttaaattgtagttttttctttaatggcaagttttagatactataatttcttgttatttctctttatttgaccattgtgattcattacttacaggttctgattccatgtgaggtttgataacgttttttatggtagtttagatattagttatcgtttctttcctttcttacagccccctggccactgttctaggtgctgttgttctactaaacaaggaaacagtcaagagtcatcgaataccattaagaaggatcatacagggaaatccaagatacccaaaatatattttgggacacgcacacacaagcagattgctcagattactagagagctccggaggacggcatattcaggggttccaatgactattctttccagcagggatcatacttgtgtccatcctgaggtagtcggtaacttcaacagaaatgagaagtgcatggaattgctagatgggaaaaacgtgagtaaagttattttgtgttagagaaaaaataaggctgaaaatatttaaattactcagtatgtgttttatatgtacattttagtgataatcaacttcggaaaatcaaattaactgctagtattgatatcttttaaaaaacaattttcctgtaataaaatctttagtcaagttttaaagtatgggatttggtcttaaagcttgggatatttaattccttgaaattaatttctgttgtagtcagacatcttagtttcttcttttaaatcctgctaccaaaaatagtcaaacttggatgatatcatatgaggagatagaagtgtttaaatggtttagtctaattagatctaattaatatactttatatacttaaaaacttcaaaagcagatagtttatttaggctgtctgggcaaagtttgaattttcttaattgaatgagaaatataatgattatcccacctcataattctgataaatacaaacccctcttttaaaagtt

SEQ ID NO: 168 - DNA, 1222 bp, Homo sapiens
tacttaccttccttccttcttatttatatttgaataagaaatactatcacatggctcaaagttgaaaaggtacaaaagggtctacagagaaaaatctctcactcctgtgcccagtcacttaattctcatccttggaagcaaccagtgataccattgttttgtgaatcctttcagaagtatttcatgcctaacatcagtttaatcagaaaaaaaaaggcataacaaacatatttaaaagaaatttttttcaagttaatttagggtatttggagctcttccgatttggacttctatctaagtctgagtcaaccagacttcgttgtgattgtagctatggtattgtctcaaaaaagacaaaaaattagccaggtgtggtggcgtagccagtaaaatcttagccttgtggctttaatgatgttcctcaaattctgagataagcttattttattccttctatgctaatattggttcacatttcagttatgcatatttgtttctagggaaaatcctgctatttttatcatggagttcataaaattagtgatcagcacacattacagactttccaagggatgtgcaaagcctgggatatagaagaacttgtcagcctggggaagaaactaaaggcctgtccatattacacagcccgagaactaatacaagatgctgacatcatattttgtccctacaactatcttctagatgcacaaataagggaaagtgtgagtatatgtgtaaaaatgagaaccttcttcctactcatggagatgtaaatgttgaatgtaaaagcttttagatgttttaattttttttgctttaatttatgtaaataaatttgtgtaaacatattagagtactgaaaacatatcctaacatgggttaaaatcaacccactcattttaatttccaaaataacaagcagttttaaggaacatagtgactgaagtgggattacagcaggatttctctttgcatttatgaatattcaaaaagaattatttagaaacatttctctgaaaaaactatgttttgaagaacttatgtgggggaataaaattatgccttgtgagctttgagaagtgaacttcagataatggcatttgtgtttgtttgcctggttctttttagagacatgcaattgttaacagcataagacaaaaagtgaataatttggcatagtcaattgttattcctgtcttcagatctgactgcacaattcatc

SEQ ID NO: 169 - DNA, 1200 bp, Homo sapiens
atatatattatgttagtattttaagagtcattttaatcttgtattgttattttacttttaaaggttttatgcttttaatcttgtattgttattttacttttaaaggtcttatgcttttaatcttatattgttattttatttttaaaggtcttataattagtttgtaaaattatgttggaaacactttcatagtgggattttatacctttctgtgtagcctgtggtaccttgatccagactcactgacatatttttgttgctgtcgataggtttgcaaagtattttaagagtaaaaaaatggcaaacacaataatgtagagctgatatttggttggccatagtgcttcagaagttttatttaagacctagaatctctgttgcttatgtaattgcatttgcaatattggcctatagtgtgaattttaaaatgaaatatcttgcctgctgttgttaaatctattttgccaaatgttttacaagaaaattcttttatcttatagatggatttaaatctgaaagaacaggttgtcattttagatgaagctcataacatcgaggactgtgctcgggaatcagcaagttacagtgtaacagaagttcagcttcggtttgctcgggatgaactagatagtatggtcaacaataatataaggaagaaagatcatgaacccctacgagctgtgtgctgtagcctcattaagtaagaagatttgtctattagtgtatttgtgctgcctttatatgaaaaatatgtttgattatgccagagtatttaaagttagtaaactttggttaactaggcttcttgggaaatgaattgttccttgccagttaagctttaaaaacaaggctagtccaaccttttgtcttgttcacaagaatataatgaacataagtgatttttaaaaatgaataattgtgaatcttattcctaatttggcaggataacataatagccccgaaggatgtgtctaggatattgaaccagaaactaaacgtgcttttaattaatatattttaaaattctggatcatggctttaatttattgctttattctccaatttaaataggattctagtttcatgggttttaattaatcaagatttcagtactctaaaataatatatttagtactagctttatgacaatttacactaatttttcttttattagacattaagttgttgatctagaatctt

SEQ ID NO: 170 - DNA, 1133 bp, Homo sapiens
ttattttcactacccagaacaatgtctggaataaaataggcattcaaacacttaatgtatgaatgtgtatatatatcaatgaatgtatttatatattttctagtaattctcttttttgtgttaatatgtaacactttaatttctttattaggttgttttgcatttccttttatatatatttgggataagtacctaagacctggctctcagttgaagagacattagctaagtaaagcaatgtgaatccacaaaacaagtgggaaatcatatgcatgtttgtttcttctgaataaaagctttcttttcagttatataaagtttattttgcaatatgagacatgaatgctttttaaaaggtgtcttaattaatccacattcatgtcctaagaatgtcaagatatacagatcaacgcatgacaataatgatgattctcttgttctgctgaaatagtgtgtgtaaggatgatactggttgacacaattgttttattttatttcagttggttagaagcaaacgctgaatatcttgtagaaagagattatgaatcagcttgtaaaatatggagtggaaatgaaatgctcttaactttacacaaaatgggtatcaccactgctacttttcccattttgcaggtaagatattttttctacctgtgaaacgtatttagtgaattagaagtgatttagtcgtgactaaatccagattaaatctagtgagtaacccagaattgttaaatatagcaatttaattttttaaaaattttattatctaaatttgataatctttaagtgatggcatgggtaaattgtgggtgaaaatatagcattatttagtttgaaggaaattagtctttaaagggattaattgctttgtttaaagctaaaaggagtcaatatttttaggttgtagacttacttagtcaattgtaaaagttaaaattttagaaaataaaaagaggagaaattcctattttgttcatcttaatttagaaattataaacctgatattcatggagagatcatgagtaggctttggaagactatgaaacttatgaagctatatgcaaaattttatgagcgtatccttttgtacatttttctaaatagaggctgcataaatttcattatatttt

SEQ ID NO: 171 - DNA, 1155 bp, Homo sapiens
ctgggtaacttacaaagaaaggaggtttatttggttcacagttctgcagcttgtacgaagcatggctccagcatctaattttgaggaccttagcctgcttccactgatggcaaaaggtgaaggggagctggtttgtacagatcatatggcaagagaagaagcgagagagagaagggagggaggtgtcaggctctttctaacaaccagctctcgtgggaactaacagagcactaactcaccccctctctacttagggagggcgttaatctattcatgaggtatctacccccatggtcccaaacctcctgatatgccccacttccattactggggatgaaatttcaatatcagatttggagaagtcagactatcaaactatagcaattctgttcacctaaaatttcaatgcatgttttgttgggtttcattgtatttttgagaagtttctttttccaattccctcccaacccctctatacttaatatggtaatttcttatagggacatttttctgctgttcttcaaaaagaggaaaaaatctcaccaatttatggtaaagaggaggcaagagaagtacctgttattagtgcatcaactcaaataatgcttaaaggactttttatggtacttgactatctttttaggcaaaatagcaggtaagtgaagataactagtatgtattttccttttaaaaatagcctaatttggatgctagcatgtgtttaatacatacctattttgggtgagtaaataggagaattgaaaacaagtgttatagatattattatatatttgctcttattgacacagacttagaggaattgaaattagtctgatgcttttttgagacagggacttctctgtcacccaggctgaagtgcagttgcatgatcacagctcactgcaactttgacctcctgggcttaagcaatcctcccacctgtttcctgagtagctgggattacaggtgtgcaacacccacacccagctaattttttaatttttattttttttgtagagatgagatctcactatgttgatcaggatggtcttgaactcctggcctcaagtgatcctcccacctcagcctcccaaagtgctaggattgtaagtgtgagcccatgcctggccaaaattagtcttttatattaatgaa

SEQ ID NO: 172 - DNA, 1166 bp, Homo sapiens
ggaatgtaagaattttataacttgttgctaatactttaaaaactttcagtaaaaattatccttctattttctcatttaataaaaaagtataacccaccttttagtctctttaaccataatactgttttctattttgtaactcatcatgtagtagagcatgcagagagctctggactgggagttaggaggcctggattttaattctgcttctgccatgacatatgtaatgtttgaaaatgaggttaggaagtagctgataaaagatagatggttagatgatttctaatattccctctgagaatcagttgattctatgattaatggctttattaatatcagaattactgaatttaattaatggtaaggagaatgttatttttgaatgggaaggtaccagctctttcaaatgagttttaatgtaatcagtttttatattgtatgtagctgggtcataggttttaaaagttttgccacttaattagcactttctttgcatctagatttgcagatgattataaaattgcgattcaacagacttactcctggacaaatcagattgatatttcagacaaaaatgggttgttggttctaccaaaaaataagaaacgttcacgacagaaaactgcagttcatgtgctaaacttttggtgcttaaatccagctgtggtaagctcatcatgtaaatggaaattttgtcttcttgctcagtaccagcattttaataaatgtggttgactcttttaaagatagttgtttgttgttgttgttgttgttgttttgaggcagggtcttgctcttcacccaggctggagtgcagtggtgcaatctcagctcactgtagccttgaccttccaggctcaagcgatcctcccaccttagcttcccgagtagctgggactataggcatgtgtcaccatgcccggctaatttttgtattttttgtagagacggggtttcaccatattgcccaggctggtctcagactcctagactcaagcgatcttcctgcttcagcctcccaaagtgctgggattacaggtgtgagccactttgcccagcctcttctaaagataattttatttatctaatgttgttttcttttaggccttttcagatattaatggcaaagttcagaccattgttttgacatctggtacattatcacc

SEQ ID NO: 173 - DNA, 1141 bp, Homo sapiens
aacgttcacgacagaaaactgcagttcatgtgctaaacttttggtgcttaaatccagctgtggtaagctcatcatgtaaatggaaattttgtcttcttgctcagtaccagcattttaataaatgtggttgactcttttaaagatagttgtttgttgttgttgttgttgttgttttgaggcagggtcttgctcttcacccaggctggagtgcagtggtgcaatctcagctcactgtagccttgaccttccaggctcaagcgatcctcccaccttagcttcccgagtagctgggactataggcatgtgtcaccatgcccggctaatttttgtattttttgtagagacggggtttcaccatattgcccaggctggtctcagactcctagactcaagcgatcttcctgcttcagcctcccaaagtgctgggattacaggtgtgagccactttgcccagcctcttctaaagataattttatttatctaatgttgttttcttttaggccttttcagatattaatggcaaagttcagaccattgttttgacatctggtacattatcaccaatgaaatccttttcgtcagaacttggtgttacatttactatccagctggaggctaatcatatcattaaaaattcacaggttagttgttgtttttttttttggaaggccttcagtgtttctacttcaatataactatgtaaacaagttagaagatacctgaagtgccagcaagtaaatcttggtaggaaattcaacattccagttttacaataaaagaaaatctgtcagctacttaatgatgtgtcaacagaaggaaataatccagtcacttgggatgcaaaaggctgtatttcagcttcttcttctaagtaagttttagttttgtaatgaaaacaaaattttgatttctttaattctcattgtataattatgttttatttattgattgattgatttttgagacagagtctggctctgttgcccaggctggagtgcagtggtgtgatcttggctcactcgtgtttaagcaattctcctgcttcagcctctcaagttgctgagattacaggtgtgcgccgcacgcctggctaattttttatttttttggtagagatggggtttcagcatgttgtccattc

SEQ ID NO: 174 - DNA, 1162 bp, Homo sapiens
aataactgtaagatgtggtgggtgtgatttttttctatgactaaggatctttgagcaccaatgaatttttgaaagagtagttcctgtcatttttgagacttgcctatggcaaattatactggccttcatccccagtattttggaattatctgattctgctattggtatatattcatcatttcacttgttcatttattcacctaacaaaaatttgttacatgcttaaattttgcaaagctattaagtaaacagagacaggtacaacctgttttgctttcaaagaattttcactctaagagaatttagtgatctgcctaaagcaaaacatttataaattaaatctgtatacagttaattgaaggtaatagaaaaccccctgacaatttaaaaataaattgttaaacttgttgcttgatcttttatgtacatacttccaaataaatactaatttccatgcctttttcaggcataactctaataatgacatattcatattctaggtttgggttggtaccattgggtcaggccccaagggtcggaatctctgtgctaccttccagaatactgaaacatttgagttccaagatgaagtgggagcacttttgttatctgtgtgccagactgtgagccaaggaattttgtgtttcttgccatcttacaaggtaagggaatatttattgtttcttttgcctttaaataatcatttacattttaaacattggcatgctaattttaaaattaccacagtaagcttcctagggtagaggcaacaaggtaataactatagttttctaaacatcacatattattttacttattttttgattaagatactgcctgattgtcctacctctgttttacttaaaagtctgaaagagcaaggctggacgtggtggctcatgcttgtaatcccagcaggttgggaggctgagctgggaggatcacttgagcccaggagttcgagaccagcctggagaacatggtgaaactctgcctctacaaaatacaaaaattagctgggtgtggtggcacacacctatagtcccagctacctgcgaggctgaggtgggaggattgcttgagcccaggaggttgaggttacagtgagctatgattgcacccctgcactccagcgtgggcaacagaataagactctctctaa

SEQ ID NO: 175 - DNA, 1160 bp, Homo sapiens
cttagtaaaatgatcttaaatcatcttcatttgaagactatttaagaatattaagaaacttcaccttaggtttaaagagagaacttaaagtttgttaactttgacagaggttttttgttttttgcttttgcttttgaaattgccaagatagtagtagtagtagtagtagtggtggtggtggtagaaattgccaagataatagtagaagtagtagtagtaatagtagtagtagcagtagtagtggtagaaattgccaagataatagtagtagtagcagcagcagcagctaactgtgccagcaccattcagatctctctaaatctgttaataaatttaaccccataacagctctatgagatatattgttttcctcattttataaatgagaaaagacacagagagattaatatacttgccgtagtcacattggcttaaacaaatgaagttaagtttgtttagctagacacacaaaaaatcatttttttctttcccctctttagttattagaaaaattaaaagaacgttggctctctactggtttatggcataatctggagttggtgaagacagtcattgtagaaccacagggaggagaaaaaacaaattttgatgaattactgcaggtgtactatgacgcaatcaaatacaaaggagagaaaggtaactggaaattatttcatggtcggtgaaaaaatattttttattacaaagtaagaaggtacaattataattttatatttttagatgaattacacttaagagaaaaattataatcctgagtgaaaagaaaataaattgggtaaagaaattcttttaattgtacttgttctcctatgaatattttcacttgagtatgctgattcaactttaagaaaaacgatgccatcatctcacagtcttcagtgcactacctgaaatagtttgtgcaaaaaggcagttaggatatatataaatatattccttactagccaaatgagacctatattctgatgcatttagtacacttggtgcttgtattctattacataaggtaaacttgaattttcaaaacataactgaaaactcaattccaagttagagcatatccatgaagagtttgatgtgaggccgggcgtggtggctcttgcctgtaatcctagcgctttgggaggctgaggcgg

SEQ ID NO: 176 - DNA, 1122 bp, Homo sapiens
aagaaagaggtaatataacatatcagtatctttttatggtgtatatattatggtgttctctgtgtctgttttcaatacttttaaatatattgattccatatgatatgtattatcaattacaattatttcaattattctgagaattttactttcaggtggtaaaggtaataatgcaacttcaatttttattaaataaacctgtttataatcacacagttcatatgcaagttgctattctgacatgtttttactgtataagttatctggaagatgcagagtttgtaaattggtttgctacccttttgcatataaatgtaattttgttccccttatttacttaaagacattgaacttttaaaactttatctcataatagtgttttattttgattattttaaatttgctactgtaattactataattataaatcaggtattttcaaaatgacaagaataagcaatttctgagaattttggatatgcttttttctgttgtttaagatggagctctcctggtagcagtttgtcgtggtaaagtgagtgagggtctggatttctcagatgacaatgcccgtgctgtcataacaataggaattccttttccaaatgtgaaagatctacaggtaggccatcaaaaccttaagttttattattacaggagtcattggttttgtataaagttaattgcagggatccctcattttattgcgctttgcttttatagtgcttttttacaaattgaaggtttatggtaaccctgcattgtgcaagtctttcagcaccatttttccaacagcatgtggtcacttgtttctgtttcacatttgggttaattctcacgatatttcaaaccttttcattattattatactgttagggtaatctgtgataagtgatctttgatgttactattgtaattgttttggggcatctcatactgtacccacataagagagcaaacgtaattcataagtgatgtatgtattctaactgctccactgactacccttcccccatttctctctccttgggactctccattccctgagacacaacaatactgaaattaggccagttaataaccctacaatggccccagagtgttcaagtgaaaggaagtgtt

SEQ ID NO: 177 - DNA, 1113 bp, Homo sapiens
ttctaaaagtatattaaatgaaaaatgtcacaagtcattacatagtatatgataatatttatatgaaattctataaagggcaaaacagaaagcagatcagtggttgccagggccagcagtggaagaaagaaatttactataaagggataagagggaacttttgggggtgatgaaaatgttctatattatgatggtggttacattactatatatgtcaaaactcacctacttgtacactgaaaattgtgtggatttaatgaatgtaagttcaataaaactgcttgagatcacacagctgattagttatatgcattaggtaatttaaggaatgtgaagctaaataaaactattttaaatgaaacgaaaaaaatcagtactgaaaaacaaaataaaatctctaccctaaaaatatgtatattcaaactgttagaagttaatatgatgtttaaaatgagctttaattatctactaattttttaaatatattttaaaattattaggttgaactaaaacgacaatacaatgaccaccattcaaaattgagaggtcttctacctggccgtcagtggtatgaaattcaagcatacagggccttaaaccaggcccttggtaggtaagtggagtgaaatttaatataatattatctgtgacagggctatatatataaatctagtcttgctactttactctttataataaacttggtaaaattttatttaactggaaccataggaactggtatgtattcaatgatagctgtcacaagtagaatttgaaaagagtaagaagaataagttattcccaaaacaaaactcacaatttgctaaagtttaaagaaattttgtgattgatctaacaatgaatagcacacaaagatgctcagtaaatattaaagaaagcttatcaaatcaaaaaagttttgtcttgtgaacatcaaagctcagataacaattttatagataaacagacctctctcctcacctcccccaaaatgtcagggaagaaaattgatataccagccagtgtgaggagatattctatttgaaagtgtactttcagtacggaatctgtgtatctgttaaaatatcatcaaatagaaacaaaatctatttt

SEQ ID NO: 178 - DNA, 1083 bp, Homo sapiens
gaatgcaaggatgattcagtgtttgaaaatgaaccagtgtaatctaccatattaacagtcaaaagaagaaaaactacatgttatgtcaattgaattttagaatatttttgacaaaattaaatgtttattcatgatttaaaactctcatcaaactagtaaaaaggacctttacaattatttataatacttaaggtaaaaaaaagaaaacagtctatgtggctaagaaagatcttagaatatattttctataattttcttgagtgcaaaataaaatacaacattttggatgcaagttatctgtatttggaaaaagtagggaatttttaatacatctagtttgttacattgtgttggatagcttctgtaacttttctgataataacaaattgtttaaaggaatctataaaattgatttttttccaattttctgtctgtcccactggaaaactggatttatttccgatgttataattatttgactttttccctattttttctagatgtattagacacagaaatgattggggagctcttattctagtggatgatcgctttaggaataacccaagtcgctatatatctggtaagatctcagctgggcttagagtaaaaactagtaacaatcttcatatttttattgtggtgaaaaacacataacatgagctctactatcttattaagtgcacagtacaatattgttaactataagcacagtatttcacagcagatatctagaacttttaaatcttacataactgaaacttaacaccaactgaacagcaatgccccatgtccctctcccccctgtccactgacaaccaccgctatactttctgcttctattagtttgactgttttggatacctcatataaattgaattatgcagtatttgtccttctgtaactggcttatttcagttagcataatgtcctcaaggttcatctatgttgcaggatttccttcttttcaatgactgcttaatattttattttatgtatacattataccatattttctttatccattcatctgtcagtagacatttaggttgtttccccctcatggatattgggaacaatgct

SEQ ID NO: 179 - DNA, 1330 bp, Homo sapiens
cagaataattttaatttaagatatatttggaattggtggaggaagggaacaaaaaaacttgagactagaatcttgaaattatttttgcaaaaggagtaaaatttagaatattagaatggaaagttgtattgtttacaacttctagtttccctacaaaaaaaaaaggcaatttttgtggggaattatgatgaaattaaatttgccatgttcaccagttattcttaaccagagaatatgttttcccatctctgccctacttctactgcctctttgctctctccatttgacaattactgtatataaagagaatgttactcatatgttactgatacatatgtagtaaaattgctgaattgcagaaaaaacatatggagaaccattctgtatattcaaaatacaaattaggttacttcactagaaaaagcaagtgtattaccttagcatgtaatattttaataactaagtaaccaaattttccctgggtttacctttttctttaggactttctaaatgggtacggcagcagattcagcaccattcaacctttgaaagtgcactggaatccttggctgaattttccaaaaagcatcaaaaagttcttaatgtatccataaaggacagaaccaatatacaggacaatgagtctacacttgaagtgacctctttaaagtacagtacctcaccttatttactggaagcagcaagtcatctatcaccagaaaattttgtggaagatgaagcaaagatatgtgtccaggaactacagtgtcctaaaattattaccaaaaattcacctctaccaagtagcattatctccagaaaggagaaaagtatgaaaagttcttcccatttacctttgatagagaagtctttcattatatttagtgaaatgatatttatttgggtatagattaattccttaaatatggtggtttgtaatataaggtgttatcataaaatagtgaaacagtatggtgtactgtaatgggaacaaacttttgtcaggagaccagagcatattttctggttttccactaactggctttgccacttactagctttgtgatcatgagcaagtcatttgtcctttttgagtcgtaataggaaaaaaaaaatgcctgcctagctatcccttcaggttgggttgtaaaggtcaaaattataaatatcacagcattgtaaagtaccatgtaagtggtagatgttattctaaaggctatataaaaatttggcctaatttttatgtagatacttctatatgaactacttttcctatatagatagttcttatgaacttatttttaggaggtgagagacatttattttaagt

SEQ ID NO: 180 - DNA, 5955 bp, Homo sapiens
ccgattaacttggtaatcaggaaacctagtttctagtcttggtcttcttactaaccagttttataactttgagcaaataacttagccttatgtcactttccttatttattaaataaaagaattagtctaggtaagtttttctcagtcactggttagtggattttcaaggcaaatgtttacagcctgttccctcctttcctcagctcccttcctcttcccttttaccccttctttcctcattcattcttgagctccctgctgtggaatttgatagtttaccagacagcattataacttgggctaggaaacattagagacctaagatttctttcagagttaatattctgttccaagatgaaaatccactagtattcgttgggggctctaagttatgtatcctatacagttatttaggtatttctaataaataattattttaacctagcaattatgttagctaggagcagaaagttaaatctcttaaattcttgtattcttagatgatccagtattcctggaagaagcagggaaagcagaaaaaattgtgatttccagatccacaagcccaactttcaacaaacaaacaaagagagttagctggtcaagctttaattctttgggacagtattttactggtaaaataccgaaggcaacacctgagctcgggtcatcagagaatagtgcctctagtcctccccgtttcaaaacagagaagatggaaagtaaaactgttttgcccttcactgataaatgtgaatcctcaaatctgacagtaaacacatcgtttggatcatgccctcaatcagaaaccattatttcatcattaaagattgatgccacccttactagaaaaaatcattctgaacatccgctctgttctgaagaagccctggatccagacattgaattgtctctagtaagtgaagaagataaacagtccacttcaaatagagattttgaaacagaagcagaagatgaatctatctattttacacctgaactttatgatcctgaagatacagatgaagaaaaaaatgacctagctgaaactgatagaggaaatagattggctaacaattcagattgcattttagctaaagacctttttgaaattagaactataaaagaagtagattcagccagagaagtgaaagctgaggattgcatagatacaaagttgaatggaattctgcatattgaagaaagtaaaattgatgacattgatggtaatgtaaaaacaacttggataaatgaactggaactgggaaaaactcatgaaatagaaataaagaactttaaaccatctccttccaaaaataaaggcatgtttcctggttttaagtaataatacttaactctcaagctaagtaaaaatatgtcatcatgcttatgttaaactctgttgtaagtaataatttgtaaattgaataagtggcatactttttaaaaaactattttatgttcagaaatgtaaatgttattattcttgagtttttgggtttttttttttgagacagagtcttggtctgttgcccaggctggaatgcagtggtgtgctctgggctcactgcaaccttcacctccaggttcaagtgattctcctgcctcagccttctgagtagctgggactacaggtgtgcaccaccatgcccagctagtttttgtatttttagtagagatggggtttcaccatgttggccaggctggtctcgaactcctggcctcgtgatctgcccttctctgcctccctaagttgctgggattacaggtgtgagccacagtgcctggcccattcttgagttttgataaagtaattcatacaaagtactgtcctcaaataagtcttccttagctaaatgcaatttaaaattattcaaagatcctagggcacttctagtttcacgtaaatattcatattaggtggttctcttcatccatttgttttcacactgatacataaaaattaacagcagtctaatctagtgacacctcagtcatatttcgctatagattttacctcaaatcagtccaagactttttcagagatcaccatttgtcttgaaaggtttatttcgttattaaactgcctacttataagtaattaagagaaattaagaaagtagtatgcatttttaattgaaattgttttacattctttgtataataaacctaaaaccaaacatgtcataaacaaattgacgtaaagatataaaatgccaaatgaagtattccaaattttctattctaattatttagcttcaccatcattgtggaaaaaaatactagatcctgcttagtattatatatttttcctagtggatcagtgagtaataagtaccaaacactagactagaaggtaatttctacattgtttagaaagggtgaaacaatttatcccctctggtattgttctagcataagctttagttatacaatgattaagatagaaaacttcatatataaatttgataagcaaacccacatttatagctgcagctaaaatatgtttccttagggcacagtaatcctttctgtgaattttgaccttgtttgtgtttttgtgaatgaagctatatgtctaatcaaaaatgattataaaagaggctcatctctgacatcattccaaaaatacattcattgatctctttttaagaaacatctgttattcactgggcattgggactttttgtgagtaatttgaattgaaattttatgagctatccaagaattctgtatggtctattattttcaagtcaaaatttccagtaaggatttactttacatttcatttggataaatgaatcattatataggtatgtctttgcttccattttgagacatttagatttttacagcctgtttctatagcatttgatgttacaactctaagcgtagttcaaagacatttaaattgacaagttaccagttaaagaatttagaatatattagatcccatctagtattatatattttttctagttgatcattgagcagtaaataccaaatactcgattagaaggtaatttttacattgttttgaaagggtgaaacaatttatctcctctggtattattcttaaaccacagatagggatagtagggtagtgaaacgaataaatacctggtagaagacaagagacttgggctctacacctggctctgccactgatttgctaagtcatattggcaatcaccacacccttcagggaattagtttcatctgtaaaatgcagcggttagtactataaaatcatacaaatttctttgtgctttgagaatctataaaggaatgtctgttgatattctgagtcgattttcatttgcttttgttccagaacggttaaaataaagcatattatttcatttaaaaagtaaagtggctcttactcatttacatttagggaacgatggtgacgtggtttggctatgtccccagccagatctcatcttgaattgtagttcccataatcccgacgtgttgtgggaaggacccagtgggaggtaattgaatcgtgggggcggttaccctcatgcggttctcgtgatactgagttcttatgagacctgatgattttataaggagcttttccctgcttcactctcattcttctctcctgctgccctgtgaaaagttgccttccgccatgattgtaagtttcttgaggcctcctcagtcatgcagaactgtgagtcaattaaacctctttcctttataaattacccagtcttgggtatgactttattagcagcatgagaacagactgacacagatggtatatgtgcataataacttggaaagctagatatttattttcgcaatgctacaattaaaacattttgaggacttttaaaattacctttagggccaggcgcggtggctcacgcctgtaatcccagcactttgggaggccgaggcgggcggatcacgaggtcaggagatcgagaccatcctggttaacacggtgaaaccccgtctctactaaaaatacaaaaaattagccaggcgtggtggcgggcgcctgtagtcccagctactcaggaggctgaggcaggagaatggcgtgaacccgggaggtggagcttgcagtgagccgagattgcgccactgcactccagcctgggcgacagagcgggactccgtctcaaaaaaaaaaaaaaaaagaaattacctttagaattggtaaactacatgagaaaattaagcatattattcatatcttagtgttattacccaacttcatctccaatactttcccctttccctagctagatatgtttttgtttgtttgttttagacagtcttgctctgtcgctcaggctggagtgcaaaggcacgatcttggctcactgcaacctctgcctcgcaggttaaagcgattctcatgtctcagcctcctgcgtagctgggattacaggtgtacaccactgcacccagctaatttttttttttttttttttttaagtatcgacagggtttcaccatgttggccaggctggtctcaaactcctgacctcaagtgatctgcccacctcggcctcccaaagtgttgggattacaggcgtgagccaccatgcctggcctagatattttttattctttccaaaatttaattctccctgaagttaaaaattttcattactgagaatgtacatagagatgtgtcacaaccctttagtaattccaaaaggtgtttcaaaaattttatacaatgataatcactgttgaaacaggtgtatattctcctcagatcatgactgaccaagatgatattccaagaagtaaactactggcctttatagagtaggatgtaggccattttcattactgataacatacttttaaaagaaatgtttacagatttaaataagttaaaacatctaaatgcttttaaaagagcacctggcacattgcaagttattcattattaattagtagatgaatcatatatctggagtgcacccttgctctatatgaaagcttccctaactatagatatataggtgatagactgacaataaagatttgaggaaagaaaaattatttggctggcttattttttaagcttttgagatgtataaggtagagattgtttatcaaataatttatgtgacacattcaatgcatatgaaataattatctaatactgaatttattcaaggactgaaagtatatagagcacacaggctgcaaaccaggaaaactaccagttagagacagggctttattcttggaataaaggtacaatgtaaagagtagatgtttcatgacttgattaaattatttaaaactgtctagaattgtgttataaaactattactatgtttctatgcacttagttattacatgggtttaaatttggcactgtttctaagtttctataaggctttgttgttaagatctttctattcaaaacattaattttaacaaaaagcttttccccgttatttttctgcaactggacttttttgtattactttcctatattaaaacgcatttaaaatatttaattctttagggctgcttacaaaatttcatgaaatcaaagcacctgttgtcaaatcacttgaaaggctggttatcatggtcatctctaagtgatggcattcttttgtatttgattaccacacaattattctcgcatatgctcttttaaacgctgatttctcaatgagttacacaagaatttaacctttatgaattcttggtggtttattatctatttccataggtaaatgcagttaatcttttgtaaatagatagtattgatgataatcaaaaaaaattttaagaccagatcaagcaatgaatgtaagaaagctaaaaccttaacgtaaaataactgcagagctatgaaaaatacaataaagaacatcaggaaatagaaatttggaaaagtgaccaaggcttatgatcctctagccttaaacaattttcatgtctcaaaaaaaaaaaaaa

SEQ ID NO: 181 - DNA, 1500 bp, Homo sapiens
gcacccttgctctatatgaaagcttccctaactatagatatataggtgatagactgacaataaagatttgaggaaagaaaaattatttggctggcttattttttaagcttttgagatgtataaggtagagattgtttatcaaataatttatgtgacacattcaatgcatatgaaataattatctaatactgaatttattcaaggactgaaagtatatagagcacacaggctgcaaaccaggaaaactaccagttagagacagggctttattcttggaataaaggtacaatgtaaagagtagatgtttcatgacttgattaaattatttaaaactgtctagaattgtgttataaaactattactatgtttctatgcacttagttattacatgggtttaaatttggcactgtttctaagtttctataaggctttgttgttaagatctttctattcaaaacattaattttaacaaaaagcttttccccgttatttttctgcaactggacttttttgtattactttcctatattaaaacgcatttaaaatatttaattctttagggctgcttacaaaatttcatgaaatcaaagcacctgttgtcaaatcacttgaaaggctggttatcatggtcatctctaagtgatggcattcttttgtatttgattaccacacaattattctcgcatatgctcttttaaacgctgatttctcaatgagttacacaagaatttaacctttatgaattcttggtggtttattatctatttccataggtaaatgcagttaatcttttgtaaatagatagtattgatgataatcaaaaaaaattttaagaccagatcaagcaatgaatgtaagaaagctaaaaccttaacgtaaaataactgcagagctatgaaaaatacaataaagaacatcaggaaatagaaatttggaaaagtgaccaaggcttatgatcctctagccttaaacaattttcatgtctcaaaaaaaaaaaaaaagaattttgtttcttaagtttcatttgatagaaccattagctgcctggcttcctgtactccacaatggagccttgttataatatacatgggatctgagccagcagatcaccttattggtaagactaccttataatgaggtgctttcagtaactaaaccctcttggaccaggtccaaaacaacccatcttacaccaaattccactctgtaataaacaagcgtcaatgtattggaaagaaaacaaaagctatatgaaatttactgttcccagaaattaacctttgaaaacccaatggtaaatactgattaaaaggaatgtgtaacaaggcataattagatagatattttagtacattttataataactttgtattttcttggctcagtcttcctttattcgggaatttatattattttgattatcttaacgctttccccaaaatttcatcatttcacatgaaaatattttacattaatatttatagaattcaatattaaagt

SEQ ID NO: 182 - DNA, 4815 bp, Homo sapiens
agtggcgtcggaactgcaaagcacctgtgagcttgcggaagtcagttcagactccagcccgctccagcccggcccgacccgaccgcacccggcgcctgccctcgctcggcgtccccggccagccatgggcccttggagccgcagcctctcggcgctgctgctgctgctgcaggtctcctcttggctctgccaggagccggagccctgccaccctggctttgacgccgagagctacacgttcacggtgccccggcgccacctggagagaggccgcgtcctgggcagagtgaattttgaagattgcaccggtcgacaaaggacagcctatttttccctcgacacccgattcaaagtgggcacagatggtgtgattacagtcaaaaggcctctacggtttcataacccacagatccatttcttggtctacgcctgggactccacctacagaaagttttccaccaaagtcacgctgaatacagtggggcaccaccaccgccccccgccccatcaggcctccgtttctggaatccaagcagaattgctcacatttcccaactcctctcctggcctcagaagacagaagagagactgggttattcctcccatcagctgcccagaaaatgaaaaaggcccatttcctaaaaacctggttcagatcaaatccaacaaagacaaagaaggcaaggttttctacagcatcactggccaaggagctgacacaccccctgttggtgtctttattattgaaagagaaacaggatggctgaaggtgacagagcctctggatagagaacgcattgccacatacactctcttctctcacgctgtgtcatccaacgggaatgcagttgaggatccaatggagattttgatcacggtaaccgatcagaatgacaacaagcccgaattcacccaggaggtctttaaggggtctgtcatggaaggtgctcttccaggaacctctgtgatggaggtcacagccacagacgcggacgatgatgtgaacacctacaatgccgccatcgcttacaccatcctcagccaagatcctgagctccctgacaaaaatatgttcaccattaacaggaacacaggagtcatcagtgtggtcaccactgggctggaccgagagagtttccctacgtataccctggtggttcaagctgctgaccttcaaggtgaggggttaagcacaacagcaacagctgtgatcacagtcactgacaccaacgataatcctccgatcttcaatcccaccacgtacaagggtcaggtgcctgagaacgaggctaacgtcgtaatcaccacactgaaagtgactgatgctgatgcccccaataccccagcgtgggaggctgtatacaccatattgaatgatgatggtggacaatttgtcgtcaccacaaatccagtgaacaacgatggcattttgaaaacagcaaagggcttggattttgaggccaagcagcagtacattctacacgtagcagtgacgaatgtggtaccttttgaggtctctctcaccacctccacagccaccgtcaccgtggatgtgctggatgtgaatgaagcccccatctttgtgcctcctgaaaagagagtggaagtgtccgaggactttggcgtgggccaggaaatcacatcctacactgcccaggagccagacacatttatggaacagaaaataacatatcggatttggagagacactgccaactggctggagattaatccggacactggtgccatttccactcgggctgagctggacagggaggattttgagcacgtgaagaacagcacgtacacagccctaatcatagctacagacaatggttctccagttgctactggaacagggacacttctgctgatcctgtctgatgtgaatgacaacgcccccataccagaacctcgaactatattcttctgtgagaggaatccaaagcctcaggtcataaacatcattgatgcagaccttcctcccaatacatctcccttcacagcagaactaacacacggggcgagtgccaactggaccattcagtacaacgacccaacccaagaatctatcattttgaagccaaagatggccttagaggtgggtgactacaaaatcaatctcaagctcatggataaccagaataaagaccaagtgaccaccttagaggtcagcgtgtgtgactgtgaaggggccgctggcgtctgtaggaaggcacagcctgtcgaagcaggattgcaaattcctgccattctggggattcttggaggaattcttgctttgctaattctgattctgctgctcttgctgtttcttcggaggagagcggtggtcaaagagcccttactgcccccagaggatgacacccgggacaacgtttattactatgatgaagaaggaggcggagaagaggaccaggactttgacttgagccagctgcacaggggcctggacgctcggcctgaagtgactcgtaacgacgttgcaccaaccctcatgagtgtcccccggtatcttccccgccctgccaatcccgatgaaattggaaattttattgatgaaaatctgaaagcggctgatactgaccccacagccccgccttatgattctctgctcgtgtttgactatgaaggaagcggttccgaagctgctagtctgagctccctgaactcctcagagtcagacaaagaccaggactatgactacttgaacgaatggggcaatcgcttcaagaagctggctgacatgtacggaggcggcgaggacgactaggggactcgagagaggcgggccccagacccatgtgctgggaaatgcagaaatcacgttgctggtggtttttcagctcccttcccttgagatgagtttctggggaaaaaaaagagactggttagtgatgcagttagtatagctttatactctctccactttatagctctaataagtttgtgttagaaaagtttcgacttatttcttaaagcttttttttttttcccatcactctttacatggtggtgatgtccaaaagatacccaaattttaatattccagaagaacaactttagcatcagaaggttcacccagcaccttgcagattttcttaaggaattttgtctcacttttaaaaagaaggggagaagtcagctactctagttctgttgttttgtgtatataattttttaaaaaaaatttgtgtgcttctgctcattactacactggtgtgtccctctgccttttttttttttttaagacagggtctcattctatcggccaggctggagtgcagtggtgcaatcacagctcactgcagccttgtcctcccaggctcaagctatccttgcacctcagcctcccaagtagctgggaccacaggcatgcaccactacgcatgactaattttttaaatatttgagacggggtctccctgtgttacccaggctggtctcaaactcctgggctcaagtgatcctcccatcttggcctcccagagtattgggattacagacatgagccactgcacctgcccagctccccaactccctgccattttttaagagacagtttcgctccatcgcccaggcctgggatgcagtgatgtgatcatagctcactgtaacctcaaactctggggctcaagcagttctcccaccagcctcctttttatttttttgtacagatggggtcttgctatgttgcccaagctggtcttaaactcctggcctcaagcaatccttctgccttggccccccaaagtgctgggattgtgggcatgagctgctgtgcccagcctccatgttttaatatcaactctcactcctgaattcagttgctttgcccaagataggagttctctgatgcagaaattattgggctcttttagggtaagaagtttgtgtctttgtctggccacatcttgactaggtattgtctactctgaagacctttaatggcttccctctttcatctcctgagtatgtaacttgcaatgggcagctatccagtgacttgttctgagtaagtgtgttcattaatgtttatttagctctgaagcaagagtgatatactccaggacttagaatagtgcctaaagtgctgcagccaaagacagagcggaactatgaaaagtgggcttggagatggcaggagagcttgtcattgagcctggcaatttagcaaactgatgctgaggatgattgaggtgggtctacctcatctctgaaaattctggaaggaatggaggagtctcaacatgtgtttctgacacaagatccgtggtttgtactcaaagcccagaatccccaagtgcctgcttttgatgatgtctacagaaaatgctggctgagctgaacacatttgcccaattccaggtgtgcacagaaaaccgagaatattcaaaattccaaatttttttcttaggagcaagaagaaaatgtggccctaaagggggttagttgaggggtagggggtagtgaggatcttgatttggatctctttttatttaaatgtgaatttcaacttttgacaatcaaagaaaagacttttgttgaaatagctttactgtttctcaagtgttttggagaaaaaaatcaaccctgcaatcactttttggaattgtcttgatttttcggcagttcaagctatatcgaatatagttctgtgtagagaatgtcactgtagttttgagtgtatacatgtgtgggtgctgataattgtgtattttctttgggggtggaaaaggaaaacaattcaagctgagaaaagtattctcaaagatgcatttttataaattttattaaacaattttgttaaaccat

SEQ ID NO: 183 - DNA, 1500 bp, Homo sapiens
attaggccgctcgaggcagagtgcagtggctcacgcctgtaatccaacacttcaggaggctgaagagggtggatcacctgaggtcaggagttccagaccagcctggccaacatggtgaaaccccgtctgtactaaaaatacaaaattagccggtgtggtggcacacgcctgtagtcccagctactcaataggctgagacaggagagtctcttgaacccggcaggcggaggttgcagtgagccgagatcgtgccactgcactccagcctgggcaagacagagcgagactccgtctcaaaaaatacaaacaaaacaaacaaacaaaaaattaggctgctagctcagtggctcatggctcacacctgaaatcctagcactttgggaggccaaggcaggaggatcgcttcagcccaggagttcgagaccaggctgggcaatacagggagacacagcgcccccactgcccctgtccgccccgacttgtctctctacaaaaaggcaaaagaaaaaaaaattagcctggcgtggtggtgtgcacctgtactcccagctactagagaggctggggccagaggaccgcttgagcccaggagttcgaggctgcagtgagctgtgatcgcaccactgcactccagcttgggtgaaagagtgagaccccatctccaaaacgaacaaacaaaaaatcccaaaaaacaaaagaactcagccaagtgtaaaagccctttctgatcccaggtcttagtgagccaccggcggggctgggattcgaacccagtggaatcagaaccgtgcaggtcccataacccacctagaccctagcaactccaggctagagggtcaccgcgtctatgcgaggccgggtgggcgggccgtcagctccgccctggggaggggtccgcgctgctgattggctgtggccggcaggtgaaccctcagccaatcagcggtacggggggcggtgcctccggggctcacctggctgcagccacgcaccccctctcagtggcgtcggaactgcaaagcacctgtgagcttgcggaagtcagttcagactccagcccgctccagcccggcccgacccgaccgcacccggcgcctgccctcgctcggcgtccccggccagccatgggcccttggagccgcagcctctcggcgctgctgctgctgctgcaggtaccccggatcccctgacttgcgagggacgcattcgggccgcaagctccgcgccccagccctgcgccccttcctctcccgtcgtcaccgcttcccttcttccaagaaagttcgggtcctgaggagcggagcggcctggaagcctcgcgcgctccggaccccccagtgatgggagtggggggtgggtggtgaggggcgagcgcggctttcctgccccctccagcgcagaccgaggcgggggcgtctggccgcggagtccgcggggtgggctcgcgcgggcggtgggggcgtgaagcggggtgtagggggtggggtgtggagaaggggt

SEQ ID NO: 184 - DNA, 1172 bp, Homo sapiens
aaagaaaaaaaaattagcctggcgtggtggtgtgcacctgtactcccagctactagagaggctggggccagaggaccgcttgagcccaggagttcgaggctgcagtgagctgtgatcgcaccactgcactccagcttgggtgaaagagtgagaccccatctccaaaacgaacaaacaaaaaatcccaaaaaacaaaagaactcagccaagtgtaaaagccctttctgatcccaggtcttagtgagccaccggcggggctgggattcgaacccagtggaatcagaaccgtgcaggtcccataacccacctagaccctagcaactccaggctagagggtcaccgcgtctatgcgaggccgggtgggcgggccgtcagctccgccctggggaggggtccgcgctgctgattggctgtggccggcaggtgaaccctcagccaatcagcggtacggggggcggtgcctccggggctcacctggctgcagccacgcaccccctctcagtggcgtcggaactgcaaagcacctgtgagcttgcggaagtcagttcagactccagcccgctccagcccggcccgacccgaccgcacccggcgcctgccctcgctcggcgtccccggccagccatgggcccttggagccgcagcctctcggcgctgctgctgctgctgcaggtaccccggatcccctgacttgcgagggacgcattcgggccgcaagctccgcgccccagccctgcgccccttcctctcccgtcgtcaccgcttcccttcttccaagaaagttcgggtcctgaggagcggagcggcctggaagcctcgcgcgctccggaccccccagtgatgggagtggggggtgggtggtgaggggcgagcgcggctttcctgccccctccagcgcagaccgaggcgggggcgtctggccgcggagtccgcggggtgggctcgcgcgggcggtgggggcgtgaagcggggtgtagggggtggggtgtggagaaggggtgccctggtgcaagtcgagggggagccaggagtcgtggggacgatcttcgagggaaggagaggggcatccgtagaaataaaggcacctgccatgccaagaaaggtcgtaaataggagtgagggtcccggggataagaaagtgaggtcggaggaggtgggagcgcccctcgctc

SEQ ID NO: 185 - DNA, 1115 bp, Homo sapiens
ggtgcaagtcgagggggagccaggagtcgtggggacgatcttcgagggaaggagaggggcatccgtagaaataaaggcacctgccatgccaagaaaggtcgtaaataggagtgagggtcccggggataagaaagtgaggtcggaggaggtgggagcgcccctcgctctgaggagtggtgcattcccggtctaaggaaagtggggtactggagaataaagacatctccaataaaatgagaaaggagactgaaagggaacggtgggctaggtcttgagggggtgactcggcggccccctcccgggagttcctgggggctcggcggccgtaggtttcggggtgggggagggtgacgtcgctgcccgcccgtcccggggctgcgggctggggtcctcccccaatcccgacgccgggagcgagggaggggcggcgctgttggtttcggtgagcaggagggaaccctccgagtcacccggttccatctacctttcccccaccccaggtctcctcttggctctgccaggagccggagccctgccaccctggctttgacgccgagagctacacgttcacggtgccccggcgccacctggagagaggccgcgtcctgggcagaggtgagggcgcgctgccggtgtccctgggcggagtagggaggggttggaaaggggccgagaaattgcactcccacacccctgggttgcaatgggcaagctccctccttggctcaaacgacaccccttggaatttacgcagatttggggatccaaacgtttacgactgaacactgtggtggagggggtaaccctgcctggttgttgactatgttataaagaagaggaggttgagggcacttactagaagccttcgtatttctcttattgccctcagcactgtagagacagtctctcatttcagactgcaaaaacctggtgggtgggaaggcctggcaggagtattcccgttttacagttgagcaaaccgaggctaagagagtgacgtccacttgctcagggtcagcagagcagatatctgaactgggatctgactcccaggccccattaagcaccatctctgggatgactgaagagcagccctctcttggttactgggctgt

SEQ ID NO: 186 - DNA, 1224 bp, Homo sapiens
ggcgcaatctcagctcactgcaacctccaccttacaggttcaagagattctcctgcctcagcctcccaagtggctgcaattacaggcgcctgccactaaacctggctaatttttttttgtatttttagtagagacagggtttcatcatgttggccaggctggtctcaagctcctgacctcaagtgatctgcccaccttggcctcccaaaatgctggggttacaggcatgagacactgtgcccagtcgagaagttactttctagacaagataatattttcaattgacaagaagatgagaaagaaatcagagcacaaggaagtcatcctgtagttgtgaagaacattatggtgatagctttgttgttctgtcaccagattatggtttgttttggttgtgtttggttttgtgggagtcttcccacaagttcgctctttggagaaggaatgctcttgtctttaatctgtccaatttcctaatctctgtgatttctgccctgcagtgaattttgaagattgcaccggtcgacaaaggacagcctatttttccctcgacacccgattcaaagtgggcacagatggtgtgattacagtcaaaaggcctctacggtttcataacccacagatccatttcttggtctacgcctgggactccacctacagaaagttttccaccaaagtcacgctgaatacagtggggcaccaccaccgccccccgccccatcaggtatgttggcatttttctgagaagttcgctgttgttttagtgcgctgtctaatccaggtttctcagccttggtaccgttgacattttgggctggatgattttgtgttgtaggggttgtcctgtgcactgtgtaggatgtttagcaagcatccctggccttaactggttagacaccagtagcacttccaccagttatgacaacccaaagtatctccacatgttgcccatggcccctggggggacaaatcagcccaagttgagggctcttggcctaactgaataattcttgctggagtttttggggtgtggggatcgggtagtgtagaagagtggtaaaggcctgaacaccgtctgggactgaatctcagccgtgctatttactacttgggtaatgttggaggaattacgtcacctgtctatgcttgagcttccttatctgtaaaatggagataacagtgaggatggaattaattaatacatgtgaaatgctaaaaatacgc

SEQ ID NO: 187 - DNA, 1144 bp, Homo sapiens
tagtcagccatggtggtgcacacctgtagtcccagctactcaggaggctgagatgggagggatggcttgagcctgggaggcagaggttccagtgagacaagatcttgccgctgtaccccagcctcagtgatagagccagatcttgtctcaaaaaaataaaaatgagattatgtaggcttgaaacagcttgtaaattataatatcaaaccctgaaaccaatacttgtgtatgcatgatgattatttgagctctggacactaagaaggataaaaagagaatgcagtctttacgatatagcaaagggtctcattggtttttgttttgattggtcattttggtggatatatataatttgtcattgataagagaatgtgtcattaaattcaaactgtacactgcccacagaaggctggggacgctgtctggctaggttggactgttagacctgaagtatccgtcttgaattgtcttatcttgttcctcatcttctttccttttaggcctccgtttctggaatccaagcagaattgctcacatttcccaactcctctcctggcctcagaagacagaagagagactgggttattcctcccatcagctgcccagaaaatgaaaaaggcccatttcctaaaaacctggttcaggtagagaaagaagttctctgtttctctgggagggatttggcagagaagtaccaaggagagaaagggaaaagacccagtgttgggatccttctttactaattctttttctttcattttgtcttcagatcaaatccaacaaagacaaagaaggcaaggttttctacagcatcactggccaaggagctgacacaccccctgttggtgtctttattattgaaagagaaacaggatggctgaaggtgacagagcctctggatagagaacgcattgccacatacactgtaagtatctcttagaagcttgttgacaccggggtaacatccacccaggattttttggtcaacccatgctggatccgcagatcagaggctctgaacacatgaggagcttaacttgacacctcttgacctgttgctaaggagaagtgatgggagaacgtgggacagtttggggttgttaatttttctccttgtcaggaagaaaggaaggagaatccgcat

SEQ ID NO: 188 - DNA, 1156 bp, Homo sapiens
aaaagagaatgcagtctttacgatatagcaaagggtctcattggtttttgttttgattggtcattttggtggatatatataatttgtcattgataagagaatgtgtcattaaattcaaactgtacactgcccacagaaggctggggacgctgtctggctaggttggactgttagacctgaagtatccgtcttgaattgtcttatcttgttcctcatcttctttccttttaggcctccgtttctggaatccaagcagaattgctcacatttcccaactcctctcctggcctcagaagacagaagagagactgggttattcctcccatcagctgcccagaaaatgaaaaaggcccatttcctaaaaacctggttcaggtagagaaagaagttctctgtttctctgggagggatttggcagagaagtaccaaggagagaaagggaaaagacccagtgttgggatccttctttactaattctttttctttcattttgtcttcagatcaaatccaacaaagacaaagaaggcaaggttttctacagcatcactggccaaggagctgacacaccccctgttggtgtctttattattgaaagagaaacaggatggctgaaggtgacagagcctctggatagagaacgcattgccacatacactgtaagtatctcttagaagcttgttgacaccggggtaacatccacccaggattttttggtcaacccatgctggatccgcagatcagaggctctgaacacatgaggagcttaacttgacacctcttgacctgttgctaaggagaagtgatgggagaacgtgggacagtttggggttgttaatttttctccttgtcaggaagaaaggaaggagaatccgcatgcatcctcatacaaccaggacaaatttagacccaagatgtcaacctgttcttggggctggaagtccctgacctaaaggaacaggacagtgatgatataagggagcaaaacccatttcttgggcttggcagcagcaagagcttaggaaaaccaagaggtcttttttttttttttttgagatagggtttcactctgtcacccaggctggaaccacaacctccacttcccgggttcaagtgattctcctgcttcaacctcccgagtagctggattataggcagc

SEQ ID NO: 189 - DNA, 1145 bp, Homo sapiens
tgtattttttgtagaaacaagatcttgctatgttgcccaggctggtcttgaaatcttgagctcaagcaatctgcccacctcggcctcccaaagtgctgagattacatgaaccactatgcctggccaggaagtcatatattgatgccaaattcagaaatatctgggggaaatgctagactaaaaggaccagagcaagtttcacccggcatggaataagagtttttcaggcccgcatcttcatctctaggcctgatgccctggtcctcgtgtgggaaatgggaggtctgagccgtggggggtgttctccagcccatggctcttaccttgttataatctcactgaagcagcagcagcacatgtgtgagaaaagtcacccactgggggtctcagagcctaggaaggtgtggcagccaggggggcgcactctgctctggctgggccccttctcccatgttttcttcctcatcagagctcaagtcaccctcacttggttctttcagctcttctctcacgctgtgtcatccaacgggaatgcagttgaggatccaatggagattttgatcacggtaaccgatcagaatgacaacaagcccgaattcacccaggaggtctttaaggggtctgtcatggaaggtgctcttccaggtatatccactaatgagaatctgaatactcagaaagactcttaggttctttggaccccaaagtgttgtccaagcccaaaggttgtgtaactaaagctgatccttcctacggacagaacttcttggcaagccattgttgtgttatatgcatgtgtgtaacagtctacctgtggaaacatataaaatagggagagtttaagaacaatcttcccttttttattattaattttttttttttttaggctgggcatggtggctcatgcctgtaatcccagcactttgggaggccaaggtggatgggtcacctgtgctcaggagttcaagaccagcctgaccaacatggtgaaacctcgtctctattaaaaatacaaaaaaattagccggtcgtggtggcgggggcctgtaatcccagctacttgggaggctgaggcaggagaattgcttgaacccgggaggcgggggttgcagtaagctgagatcacgccactgcactccagcctg

SEQ ID NO: 190 - DNA, 1176 bp, Homo sapiens
ggtcaggagtttgagaccagcctgaccaacatggagaaaccctgtctctactaaaaatagaaaattagctgggcgtggcgacgcatgcctataattccagatacttgggaggctgaagcaggagaattgcttgaacccgggagacagagattgtggtgagccgaatcacgccattgcattccagcctgggcaacaggagcaaaactccgtctcaaaaaaaaaaaaaaaaaaaaagataaccacaccctgacttttgtggtaatcattccctttcttttctttattaccatttgtgtatttatacctggataataagttgatagtttgagctttctttctcccctagcactttggtaagaattctaggaattagggaactctgacacggtaccacccccatgtcccctcctttatccctcagggcagaattggattaagcagtattgacccagtcccaaagtgcagcttgtctaaaccttcatctccttgaactcttccaggaacctctgtgatggaggtcacagccacagacgcggacgatgatgtgaacacctacaatgccgccatcgcttacaccatcctcagccaagatcctgagctccctgacaaaaatatgttcaccattaacaggaacacaggagtcatcagtgtggtcaccactgggctggaccgagaggtcaggggtcaggaggatccagagggtgtggaggacaaatgtgtattagctcaatcccgtggacaaagcaaaatcctgctaggccagttgtcagttaatacagtgatggtctaagctttgcatctaagcttgtgcccagaggttccgtgcctagaagacaggcaggctggcatgaagcacatggttaaatattctggttccatgtgttgggctgggctaggccaaaggtggctagtgttcctggtcctgacttggttgtgtcgatctctctgcagagtttccctacgtataccctggtggttcaagctgctgaccttcaaggtgaggggttaagcacaacagcaacagctgtgatcacagtcactgacaccaacgataatcctccgatcttcaatcccaccacggtaattctataactccttagagggtttccaaagaaaggtcttttgttgttcatgaactaagtgtcaccactgctcatgggcgaagtctttgaaaac

SEQ ID NO: 191 - DNA, 1129 bp, Homo sapiens
gtcccaaagtgcagcttgtctaaaccttcatctccttgaactcttccaggaacctctgtgatggaggtcacagccacagacgcggacgatgatgtgaacacctacaatgccgccatcgcttacaccatcctcagccaagatcctgagctccctgacaaaaatatgttcaccattaacaggaacacaggagtcatcagtgtggtcaccactgggctggaccgagaggtcaggggtcaggaggatccagagggtgtggaggacaaatgtgtattagctcaatcccgtggacaaagcaaaatcctgctaggccagttgtcagttaatacagtgatggtctaagctttgcatctaagcttgtgcccagaggttccgtgcctagaagacaggcaggctggcatgaagcacatggttaaatattctggttccatgtgttgggctgggctaggccaaaggtggctagtgttcctggtcctgacttggttgtgtcgatctctctgcagagtttccctacgtataccctggtggttcaagctgctgaccttcaaggtgaggggttaagcacaacagcaacagctgtgatcacagtcactgacaccaacgataatcctccgatcttcaatcccaccacggtaattctataactccttagagggtttccaaagaaaggtcttttgttgttcatgaactaagtgtcaccactgctcatgggcgaagtctttgaaaactctctccagactagagaatgttaactttaaacttaaaagcaagcatcttgagatggcagttgtcttttagtatcttttttccacccttggcctggggccaattggtgcaagattgtgaagttgcaaaaagcacctactgatttcatagtctcatggtacatttttatagcaaatattacctggtttcatttctttattgaacaaatattttctaagtttatattaggcactgtgttagacactggagagaccatcacacacaaagattccattctcatggtgtttctggtatagccaggaagacatcttatgagaattattgtatgccaaggatattacatgcattcaaggagaaggtattgagaaccaagtagggtaagtttaaatcatcctgtataatggcc

SEQ ID NO: 192 - DNA, 1183 bp, Homo sapiens
ggtggatcccttgaggatggagtttgagaccagcctggccaacgtggcgaaactccatctccactaaaaatacaaaaattagctgggcgtggtggtgcatgcttgtaatcccagctactcgggcatctgaggcatgagagttgcttgaacccaggaggcggaggctgcagtgagccgagattgtaccattgcaccccagtgcgcccattgcctggcctctccttgtcacatcttctccttgaagcttgctttcagttagccaggtgtggtggtgcatgcctgtggtcccagctactctggaggctgaggtgggaggattgcttgagcccaggaggttgaggctacagtgagccatgatcgctcaaatacactccagcctggtgacagtgagatcttatctcaaaagaacaacaaaaaaagaggaatcctttagccccctgagactcagctctgctagcagtcttggtactttgtaaatgacacatctctttgctctgcagtacaagggtcaggtgcctgagaacgaggctaacgtcgtaatcaccacactgaaagtgactgatgctgatgcccccaataccccagcgtgggaggctgtatacaccatattgaatgatgatggtggacaatttgtcgtcaccacaaatccagtgaacaacgatggcattttgaaaacagcaaaggtttgtatggtacctggcaagatgcagaaactggcatcctcacagctgttcatacccttgtcccctggtatcttcttagaagtagattcgctttggcagggggacagggtgactttcccagattgtagtggaccatgtgggatttgcagtggctcttcctgctcatgtaagaaatcaagaaactgtgctgtgtgtggtggctcacgcctgtaatcccagcacttagggacgctgaggcaggcagatcacgaggtcaggagtttgagtctctgctaaaaatacaaaaattagccaggcatggtggcacgtgcctgtaatctcagctactagggaggctgaggcaggagaattgcttgaacctgggaggtggaggttgcagtgagccaagatcgtgccattgcactccagctctgggtgacagagcaagactcagtctccaggggtgggcggggaaaaggaggccgggcgtggtggctcacgcctgtaatcatagcactttg

SEQ ID NO: 193 - DNA, 1245 bp, Homo sapiens
caggagttcgagaccagcctggccaacatggtgaaacgtcgtctctactaaaaatacaaaaaattagccaggtgtggtggcgggctcctgtaatcccagctactagggaggctgaggcaggagaattgcttgaacccaggaggtggaggttgcagtgagccattgcattccagcctgggtgacaagagcaaaaattctgtctcagaaaaaaataaaataaggaaagaaacttgaaaactaagaatttgagtgaattgcttgttgaagtgactggatccctagaatagccccagctttgccttcctcttgagtaggtgagcagatttgagaagccatggtaagtaattgtggtttctgccattgaaagtcatggcagaaaccacagttacttttgcaccaacctaatatattaccaaaagcaacagttaaggatttaattttatttttactaacacaaaatgtttcgttttgtttttaacttcattgtttctgctctctagggcttggattttgaggccaagcagcagtacattctacacgtagcagtgacgaatgtggtaccttttgaggtctctctcaccacctccacagccaccgtcaccgtggatgtgctggatgtgaatgaagcccccatctttgtgcctcctgaaaagagagtggaagtgtccgaggactttggcgtgggccaggaaatcacatcctacactgcccaggagccagacacatttatggaacagaaaataacgtaagtgtgaggatttttcaactgacttgcagcaactggttattttatatcattttatatgtaaatcaataatatgtacttcatggcattttgtcatttgtctgtacaagaccattctcttaatttattttttattccctttatctgtgctcctttcacctgttcccttcccttcacagacagccgttcttggtctgatgtgctgcctctctttgagctcttgtagtatggtagaaatgcaattttactttgcatacatactattgtgtttttttgagtttggagtctcactttgtcgcccaggctagcgtgcagtggcgtgatctctgcctactgcagcctctgtctcttgggttcaagcaattttcatgcctcagccttccatgtagccaggattacaggtgcctgccaccacgcccggctaatttttgtatttttagtagagacaaggcttcaccacattggccaggctggtctcgaacttctgacctcaagtgatc

SEQ ID NO: 194 - DNA, 1146 bp, Homo sapiens
gtggagcttgcagcgagccgacatcgcgccactgcactccagcttgggctacagagcaagactccgtctcaaaaaaaaaaaaaaaaaaaaagaaagaaagggtttcacttttgttgcccaggctggagtgcagtggtgcaatctcggctcactgcaacctccatctcccaggttcaaacgattctcctgcctcaccctccccagtagctgggattacaggcgtgtgccaccacacccagctaatttttgtatttttagtagagacagggtttcaccatgttgaccaggctggtctcaaacccctgacctcaggtgatctgcccacctcagcctcccaaagtgttgggattacaggcatgagccaccgcgaccggcctattgttggttttcaaaataaaaacgttggaagtaaccatataactgaagaagcgcttaagccgttttcagctacatgttgtttgctggtcctattctaaaagccagagcttgtccccgttcagatatcggatttggagagacactgccaactggctggagattaatccggacactggtgccatttccactcgggctgagctggacagggaggattttgagcacgtgaagaacagcacgtacacagccctaatcatagctacagacaatggtaagggggcctcatctgagcctttgctgcctcgacctcctagctagttcagttccttgcccctcccttcttttggagggaagagttcattctttttcttttatcctttttgtttgctggattgatttgtataaatgtatggagtacaagggtaattttgttacatgcatagatgtgtagtggtaaagtcagggcttttagggtatccgtcacccaaataacatgcattgtacccattaagtaattgttcatcatctaccccctcccaccccttggacccttcccagctgccattgtctatcattccacaatctacatccatgtgtacacattatcgaactccgacttctaagtgagaacatgcagtatttctccttatatgtctgattcgtttcacttgagacaatggcctccagtttcatccatgttgctgcaaaagatttctcttttattcttaaacaaaggcattcttattatcaaaaattcaagtgggctgggca

SEQ ID NO: 195 - DNA, 1225 bp, Homo sapiens
ccaatctattttgaaaaccaatttgcagagacttcaaaagacccaactcatcccctttgattttaagcttctagtcaggcttaaaattaaaataaataaaaagactcaatgctttgttaatgacctcaaatggcaggaaagtgcagaaaaaggagaactagggaaacaacaggcaggcaataggacttcttggagtagttaaaattcagtgaatgaataacgatatgtgaagaaggaggagtgtgttcttggtgtgaggaataacttgaataattgttatcaaggtgggaataagttgtctgtgtaaaacggccagagacctgcccacctgggagtggaggtcctttgggattggtgggacaggaggttctgcgggtggagtggggcctggtgagggaccactgaagagccaggacaagatctagacttggtctggtggaaggcaatggggattcattactgttgccaagctgccacattttctgtgtattttctcttaggttctccagttgctactggaacagggacacttctgctgatcctgtctgatgtgaatgacaacgcccccataccagaacctcgaactatattcttctgtgagaggaatccaaagcctcaggtcataaacatcattgatgcagaccttcctcccaatacatctcccttcacagcagaactaacacacggggcgagtgccaactggaccattcagtacaacgacccaagtgggtacctgagttttattttggcaactttgctccaactgccatgcttcccttcccccagatccccacctttcaatttcccttctcaacttctagatgtcaccccttccattgatacttgcttccttgtcccttctgtctttgaggccttgctccaaaggtctttttcctttcctggtatctaactttgtagcatgctacccagtaatctaaaacccaagcagggctccctctcccagcctctagccaccctccactcccctctccacttgcaaccaggaccatcttctctgctacctcctgctcctgggaccaaacaacaccatttttgtggttagctccttcttgccaaccaatcgtgagctcccagattcatcagaactattctaccgaggtggaggcagctgtcaactgcctggtcaatttgcatatatgggcttcctacacctacttctctctgggcttctatttccaccatgacgatgtggatctggaaggtg

SEQ ID NO: 196 - DNA, 1228 bp, Homo sapiens
aacctgaactggacccttttggatcttcatgccttgggttccacctgcacagacccccatatctgtgacttcctggagagccacttcctagatgaaaaagtaaaactcatcaagaagataggtgaccacctgaccaaccttcacaggccagccggcctccaggccgggctgggcaaaaaggttcaccctcaggcacacgggagcctaccgaacccagcgacatctgaagagccccgctctgcctaagcctctccctccagccactaggcagcttttttaaaccaactctagagccctctcccaagccttagaccaaatggaaataaagctttttacagcaaaaaaaaaaaaaaaaaagtacatacctaaataaaacccaagcagctctgctctcttcactcggcttgcgggtgtctttagttcactagcaattttattctggaatgagctttttattttcctcccctggtctcatcatttctttttattgctttctccagcccaagaatctatcattttgaagccaaagatggccttagaggtgggtgactacaaaatcaatctcaagctcatggataaccagaataaagaccaagtgaccaccttagaggtcagcgtgtgtgactgtgaaggggccgctggcgtctgtaggaaggcacagcctgtcgaagcaggattgcaaattcctgccattctggggattcttggaggaattcttgctttgctaagtaagtccagctggcaagtgactcagcctttgacttaaaaaaatggaggaggtttatttcctggaaatgatttttgttcttatattaataaggatataggttagctgatgtgggaaagagactcccaagttatgccagcctccataaaatagaagtttgtctcttactgaacatttcagaggtaaatggtctaagatgggaaggccatgaagtcaacaggggacccaggtttcttctaccttgtctcttttcattcttcaagacagtgcatcccaagcttgagagcatacaaatcatctgggcctctttttgaactgggaaatctgatccaggaggtctggcatagggccacagattctgcatttcttttttttttttttttttttttgagatggagtttcgctcttgttgccgaggctggagtgcaatggtgtgatctcagctcactgcaccctctgcttaacaggttcaagcgattctcccgcctcagcctcctgagt

SEQ ID NO: 197 - DNA, 1131 bp, Homo sapiens
ccttcaatggctccaactcagaatcaaagccaaagtcctcacagtggcccatatgtccctcccgccctgcttgcccctctgagctcttctccatgtctcttcccctcatgcaccctgctacagccatgctggcctcctcaccttccctccatcacaccaaacatgctcctcctgcctcaggacctctgtccttactgtttcctctgcctggaacactttcccccagatttgggaaaatgacagtgattgagtttaaaacccatctgaaagttaaggaccatgcttgagttcacatatcactgtctactatgttgtactgtacataccgacttcagggatgtgagtgtcacgtggattgacatcttcaagtgtattgaaggcagctagtggctgtctaactgccccctgtctggtatgaggggtgctctgtgatagctgctgcttctggccttctttatctttggctctcaacacttgctctgtctcccccaccatcccagttctgattctgctgctcttgctgtttcttcggaggagagcggtggtcaaagagcccttactgcccccagaggatgacacccgggacaacgtttattactatgatgaagaaggaggcggagaagaggaccaggtgggttttgaaaaccttggtagctcagtggtgatctctttattcggaagaagcaatgattagtaagaggtaggcatttgaaacagctctgaatcactttggatattatctttttaaggccttacccaagaaagtagacattgtcattgaccatcatcatcatcacatcatcaccaacacagctaacatttattgatcgcatactgttctgcacctcagtgagcgagctgaggcacagagaagctcagtaacttggctaaggtcacacagctaggaagcgacagggctaaatggtctgtctcagagcctgccttcctcattgccattctctggacgtgaacttcagccagattctctttgacatagaacaactggtctgctttgtttcttttgagtttttagctagaccaaactccttttctgtcatggttataccttcagtccctctgtatttcctgattttggagatgatcttaacatcttaccctggagttgtccag

SEQ ID NO: 198 - DNA, 1144 bp, Homo sapiens
gatttaggcagagtttagctgaatggctctaacctgtgaattgtgtccaggtctgttccatgcaagtctcatctttgtaccagaagctggtgcctttcagacctttgcctgtgtcatatgttactgtcccattggctaagcaagtcacacaacaaagccccagatcgatggatgtatacttttctcacaagctggggttgggagggagtgaatatttgccaaacagtgatctaatcatcatgtcctatgaaaattagtaaggcacacagcctatatctggatccacacatgctactcacaatcctttgggccatgtttttttccagtgctatttgggagacttttagcttgaaaactgtcattttgcattaaactggtaaagatcatacagttggcagtgaaggcatcatccaaccataatctataaactgaacatagccctgtgtgtatgactatttctttcctactcttcattgtacttcaaccttttttctccaaaggactttgacttgagccagctgcacaggggcctggacgctcggcctgaagtgactcgtaacgacgttgcaccaaccctcatgagtgtcccccggtatcttccccgccctgccaatcccgatgaaattggaaattttattgatgaagtaagtaatccacgtggaaagccaaagcatggctcatctctaagctcaggaggagttgtgtcaaaaatgagaaaaagagtctttagattctttcctttactatgttttcagcttgcctgagccctggagccctgttttcctttttctttttttttctttttctttttttttttttttgagacgaagtttcactcttgttgcccaggctggagtgcaatggcgcaatctttgctcaccacaacctctgcccgggttcaagcgattctcctgcctcagcctcccaagtagctgggattacaggcatgcaccaccacactcagctaattttgtatttttaatagaggcagggtttctccatgttggtcaggctggtctctaactcctgactcaggtgatccacctgccttggcctcccaaagtgctgggattacaggtgtgagccaccgcacctggcagcctgtttttcttaatctgtgtctcatctgaattttggatctaat

SEQ ID NO: 199 - DNA, 3252 bp, Homo sapiens
agcctgtgtgacaagagtgaaaccctgtctctaaaaaaaaagaaaaagaaaaaaaatacaagtccttccttagttcccacacccccactccccagatttaactgttaagcatttggcatttatccttccaggcctttctgggtggaaatgcagcctgcatgcaccagtatgcaaagcttccagctctgcccatcccagctggtggtgtggcagccccactctgatctatggggactccatcctgactggttggtgcttgcatctctcctgcctacatataactcaccatttcactttctctttccatcaacaacatatcctgtgcttctgcatccttccatgacagtgtgtataaatgtacgttgttggtgttcactgctccgtggtgtgccacaagtctgggtgcattgtcgtaccttacatattgctagacttcttgccccagatgacaggtgtgcccttcctttcactaaaagatgcttttgtcccttcttctttagaatctgaaagcggctgatactgaccccacagccccgccttatgattctctgctcgtgtttgactatgaaggaagcggttccgaagctgctagtctgagctccctgaactcctcagagtcagacaaagaccaggactatgactacttgaacgaatggggcaatcgcttcaagaagctggctgacatgtacggaggcggcgaggacgactaggggactcgagagaggcgggccccagacccatgtgctgggaaatgcagaaatcacgttgctggtggtttttcagctcccttcccttgagatgagtttctggggaaaaaaaagagactggttagtgatgcagttagtatagctttatactctctccactttatagctctaataagtttgtgttagaaaagtttcgacttatttcttaaagcttttttttttttcccatcactctttacatggtggtgatgtccaaaagatacccaaattttaatattccagaagaacaactttagcatcagaaggttcacccagcaccttgcagattttcttaaggaattttgtctcacttttaaaaagaaggggagaagtcagctactctagttctgttgttttgtgtatataattttttaaaaaaaatttgtgtgcttctgctcattactacactggtgtgtccctctgccttttttttttttttaagacagggtctcattctatcggccaggctggagtgcagtggtgcaatcacagctcactgcagccttgtcctcccaggctcaagctatccttgcacctcagcctcccaagtagctgggaccacaggcatgcaccactacgcatgactaattttttaaatatttgagacggggtctccctgtgttacccaggctggtctcaaactcctgggctcaagtgatcctcccatcttggcctcccagagtattgggattacagacatgagccactgcacctgcccagctccccaactccctgccattttttaagagacagtttcgctccatcgcccaggcctgggatgcagtgatgtgatcatagctcactgtaacctcaaactctggggctcaagcagttctcccaccagcctcctttttatttttttgtacagatggggtcttgctatgttgcccaagctggtcttaaactcctggcctcaagcaatccttctgccttggccccccaaagtgctgggattgtgggcatgagctgctgtgcccagcctccatgttttaatatcaactctcactcctgaattcagttgctttgcccaagataggagttctctgatgcagaaattattgggctcttttagggtaagaagtttgtgtctttgtctggccacatcttgactaggtattgtctactctgaagacctttaatggcttccctctttcatctcctgagtatgtaacttgcaatgggcagctatccagtgacttgttctgagtaagtgtgttcattaatgtttatttagctctgaagcaagagtgatatactccaggacttagaatagtgcctaaagtgctgcagccaaagacagagcggaactatgaaaagtgggcttggagatggcaggagagcttgtcattgagcctggcaatttagcaaactgatgctgaggatgattgaggtgggtctacctcatctctgaaaattctggaaggaatggaggagtctcaacatgtgtttctgacacaagatccgtggtttgtactcaaagcccagaatccccaagtgcctgcttttgatgatgtctacagaaaatgctggctgagctgaacacatttgcccaattccaggtgtgcacagaaaaccgagaatattcaaaattccaaatttttttcttaggagcaagaagaaaatgtggccctaaagggggttagttgaggggtagggggtagtgaggatcttgatttggatctctttttatttaaatgtgaatttcaacttttgacaatcaaagaaaagacttttgttgaaatagctttactgtttctcaagtgttttggagaaaaaaatcaaccctgcaatcactttttggaattgtcttgatttttcggcagttcaagctatatcgaatatagttctgtgtagagaatgtcactgtagttttgagtgtatacatgtgtgggtgctgataattgtgtattttctttgggggtggaaaaggaaaacaattcaagctgagaaaagtattctcaaagatgcatttttataaattttattaaacaattttgttaaaccattgtcaaatttgttttatttgattccaccacatttccagtcaagagaaaagatgcatggagatggcctcagtcaaaacgtggagaaagaggccgggcgcggtggctcatgcctgtaatctcagcacttcgggaggccgaggcaggtagatcacttgagctcaggagtttgagaccagcctgggcaacgtagtgaaaccctgtctccacaaaaacacaaaaattagctgggcgtggtggcgcgcgcctgtagtcccagctactcgagaggctgagacatgagaatcacttgaactcaggaggcagaggttgcagtgagccgaggttgcgccactgcacttcagcctaggtgacagaggagactccatctcaaaaaaataaaaaaatttttaaaaaacttcatgctgaagtgacttctccagaagtttctatcattctactggatgaacatgggagaaactacattcacatggtaactttatttgaacagtatccatccatgt

SEQ ID NO: 200 - DNA, 1500 bp, Homo sapiens
gatgatgtctacagaaaatgctggctgagctgaacacatttgcccaattccaggtgtgcacagaaaaccgagaatattcaaaattccaaatttttttcttaggagcaagaagaaaatgtggccctaaagggggttagttgaggggtagggggtagtgaggatcttgatttggatctctttttatttaaatgtgaatttcaacttttgacaatcaaagaaaagacttttgttgaaatagctttactgtttctcaagtgttttggagaaaaaaatcaaccctgcaatcactttttggaattgtcttgatttttcggcagttcaagctatatcgaatatagttctgtgtagagaatgtcactgtagttttgagtgtatacatgtgtgggtgctgataattgtgtattttctttgggggtggaaaaggaaaacaattcaagctgagaaaagtattctcaaagatgcatttttataaattttattaaacaattttgttaaaccattgtcaaatttgttttatttgattccaccacatttccagtcaagagaaaagatgcatggagatggcctcagtcaaaacgtggagaaagaggccgggcgcggtggctcatgcctgtaatctcagcacttcgggaggccgaggcaggtagatcacttgagctcaggagtttgagaccagcctgggcaacgtagtgaaaccctgtctccacaaaaacacaaaaattagctgggcgtggtggcgcgcgcctgtagtcccagctactcgagaggctgagacatgagaatcacttgaactcaggaggcagaggttgcagtgagccgaggttgcgccactgcacttcagcctaggtgacagaggagactccatctcaaaaaaataaaaaaatttttaaaaaacttcatgctgaagtgacttctccagaagtttctatcattctactggatgaacatgggagaaactacattcacatggtaactttatttgaacagtatccatccatgtggcatgtgatgaaaccaataaaattcccatgtccacgggagactgtgtgggccaagctgaaggacgggacagagcaaagtttcaaacgatgttctcggggtcagcaagtgagtacaggccagtggttctctgctggggaagaatgtagccccctcctccatgtgacattttgcaatttctggagtacctggggaggtggtcttgtcaccacatcaaggccaggggtgctgctaaacatccctgcacgggacagttcctcacaacaaagaattatccagcacaaaatgtcagccactgttaagaaaccctggtgtaagcctaaaacttttctctgttgaaggggtatgacttttttctttgggtaattttttattgtaaaatacaacataaaatttatgattttagcccttttgttaagttttcagacagggtctcactctgtcacccgggctggagtgcagtggcacaatcacggctcgctgcagcctcaatctcccagt

SEQ ID NO: 201 - DNA, 2003 bp, Homo sapiens
cacctcctgtccgcccctcagcgcatgggtggcggtcacgtgcccagaacgtccggcgttcgccccgccctcccagtttccgcgcgcctctttggcagctggtcacatggtgagggtgggggtgagggggcctctctagcttgcggcctgtgtctatggtcgggccctctgcgtccagctgctccggaccgagctcgggtgtatggggccgtaggaaccggctccggggccccgataacgggccgcccccacagcaccccgggctggcgtgagggtctcccttgatctgagaatggctacctctcgatatgagccagtggctgaaattggtgtcggtgcctatgggacagtgtacaaggcccgtgatccccacagtggccactttgtggccctcaagagtgtgagagtccccaatggaggaggaggtggaggaggccttcccatcagcacagttcgtgaggtggctttactgaggcgactggaggcttttgagcatcccaatgttgtccggctgatggacgtctgtgccacatcccgaactgaccgggagatcaaggtaaccctggtgtttgagcatgtagaccaggacctaaggacatatctggacaaggcacccccaccaggcttgccagccgaaacgatcaaggatctgatgcgccagtttctaagaggcctagatttccttcatgccaattgcatcgttcaccgagatctgaagccagagaacattctggtgacaagtggtggaacagtcaagctggctgactttggcctggccagaatctacagctaccagatggcacttacacccgtggttgttacactctggtaccgagctcccgaagttcttctgcagtccacatatgcaacacctgtggacatgtggagtgttggctgtatctttgcagagatgtttcgtcgaaagcctctcttctgtggaaactctgaagccgaccagttgggcaaaatctttgacctgattgggctgcctccagaggatgactggcctcgagatgtatccctgccccgtggagcctttccccccagagggccccgcccagtgcagtcggtggtacctgagatggaggagtcgggagcacagctgctgctggaaatgctgacttttaacccacacaagcgaatctctgcctttcgagctctgcagcactcttatctacataaggatgaaggtaatccggagtgagcaatggagtggctgccatggaaggaagaaaagctgccatttcccttctggacactgagagggcaatctttgcctttatctctgaggctatggagggtcctcctccatctttctacagagattactttgctgccttaatgacattcccctcccacctctccttttgaggcttctccttctccttcccatttctctacactaaggggtatgttccctcttgtccctttccctacctttatatttggggtccttttttatacaggaaaaacaaaacaaagaaataatggtcttttttttttttttaatgtttcttcctctgtttggctttgccattgtgcgatttggaaaaaccacttggaagaagggactttcctgcaaaaccttaaagactggttaaattacagggcctaggaagtcagtggagccccttgactgacaaagcttagaaaggaactgaaattgcttctttgaatatggattttaggcggggcgtggtggctcacgcctataatcccagcacgttgggaggccaacgcgggtggatcacctgaggtcaggagttcgagaccagcctgactaacatggtgaaaccctgtctctactaaaaatacaaaattagtcaggcgtggtggtgcacacctgtaatcccagctacttgggagactgaggcaggaggatcgcttgaacccgggaggcagaggttgcggtgagccgagatcatgccattgcactccagcctgggcaacagagcaagactctgtgtcaaaaaaaaaaaaagaatatagatttttaaatggca

SEQ ID NO: 202 - DNA, 1500 bp, Homo sapiens
aaatgagtagtcacaaggtttgcagaagggggcatgtcattttcattcattgtggtggtctggagggtgcagggggtgtggtggtaactttcttgcacatgtgcaatcctgtatccgtcttatatatgatgtgataaataatatcatatacatacatatatacatagaagcatatatgcacacatacaaatatcacataatcatagaaccttcctactggaaaaaaaaaaaaaacttaaaaggtcaagtattcctgtctcctgctcatcaataacttctctgccagatggcctcaggtctttgcattaacactcccagggaggtttggaagttggaaaagtgagaggattaccttgtcactgagcctgttggattactgtattaatctgccttccgtcatcctttaatcgtagttttgccctcaaatgggcattgtttactccctattgtagaagaccccattgttggctacatctttatagatagtcgtaccactactttaaagggccagtgacagacaccaaaaacaaaataaaaacccacatacacactggaagcaagcactcagtaaaatgttgtagaattaatgaatgaaacaatgacacaaatgagagtatgttttctcatggtggagcgaaaaggtgacagcatcacctctggtaccccaactcccaccccctccccaatgcagacaggctgaaagaccggtagtgagactggagttcagccttcagaccggtagtgagacaatccttcagccgggagttgggctctgggtggcctaggttgccatggcaccgcctcgggctccaccctctcttgtccccctcaccgctccccccctgcagcgggggttgtggcagccagtcacgtgcccgccgcgtagccacacctctgctcctcagagcaatgtcaagcggtcacgtgtgatagcaacagatcacgtggctgccatcgcccctccgcccccttacactcttcgccctcctcccagtcgaagcacctcctgtccgcccctcagcgcatgggtggcggtcacgtgcccagaacgtccggcgttcgccccgccctcccagtttccgcgcgcctctttggcagctggtcacatggtgagggtgggggtgagggggcctctctagcttgcggcctgtgtctatggtcgggccctctgcgtccagctgctccggaccgagctcgggtgtatggggccgtaggaaccggctccggggccccgataacgggccgcccccacagcaccccgggctggcgtgaggtaagtgcagtcccttcccaggaatgagaaccagtgcccgcccccctcacagctttccacgcgttcgtttcgcgagctggttatggaagggtcgctcaagggcgggaagtggggcctttgtggtcatgggaaagtataattttagggactgaggtgtaggatcttcgatgcaaggcatgtgtcatgtgtgatctttgtgcggggcgcgattgtcccaaaggaaaaag

SEQ ID NO: 203 - DNA, 1273 bp, Homo sapiens
taaagggccagtgacagacaccaaaaacaaaataaaaacccacatacacactggaagcaagcactcagtaaaatgttgtagaattaatgaatgaaacaatgacacaaatgagagtatgttttctcatggtggagcgaaaaggtgacagcatcacctctggtaccccaactcccaccccctccccaatgcagacaggctgaaagaccggtagtgagactggagttcagccttcagaccggtagtgagacaatccttcagccgggagttgggctctgggtggcctaggttgccatggcaccgcctcgggctccaccctctcttgtccccctcaccgctccccccctgcagcgggggttgtggcagccagtcacgtgcccgccgcgtagccacacctctgctcctcagagcaatgtcaagcggtcacgtgtgatagcaacagatcacgtggctgccatcgcccctccgcccccttacactcttcgccctcctcccagtcgaagcacctcctgtccgcccctcagcgcatgggtggcggtcacgtgcccagaacgtccggcgttcgccccgccctcccagtttccgcgcgcctctttggcagctggtcacatggtgagggtgggggtgagggggcctctctagcttgcggcctgtgtctatggtcgggccctctgcgtccagctgctccggaccgagctcgggtgtatggggccgtaggaaccggctccggggccccgataacgggccgcccccacagcaccccgggctggcgtgaggtaagtgcagtcccttcccaggaatgagaaccagtgcccgcccccctcacagctttccacgcgttcgtttcgcgagctggttatggaagggtcgctcaagggcgggaagtggggcctttgtggtcatgggaaagtataattttagggactgaggtgtaggatcttcgatgcaaggcatgtgtcatgtgtgatctttgtgcggggcgcgattgtcccaaaggaaaaagcgttttctattgcagggcctcacgtggctggaggggttggtattgagtcattgtgttatctctggggccggccccaaggaagactgggagcgggggatgggatgctggtggtgttctttgcgctttttttttgggagtccctttgttgctgcaggctcataccatcctaactctgtaagcgacttttggtgataggagtctgtgattgtagggtctcccttgatctgagaatggctacctctcgatatgagccagtggctgaaattggtgtcg

SEQ ID NO: 204 - DNA, 1237 bp, Homo sapiens
taggaaccggctccggggccccgataacgggccgcccccacagcaccccgggctggcgtgaggtaagtgcagtcccttcccaggaatgagaaccagtgcccgcccccctcacagctttccacgcgttcgtttcgcgagctggttatggaagggtcgctcaagggcgggaagtggggcctttgtggtcatgggaaagtataattttagggactgaggtgtaggatcttcgatgcaaggcatgtgtcatgtgtgatctttgtgcggggcgcgattgtcccaaaggaaaaagcgttttctattgcagggcctcacgtggctggaggggttggtattgagtcattgtgttatctctggggccggccccaaggaagactgggagcgggggatgggatgctggtggtgttctttgcgctttttttttgggagtccctttgttgctgcaggctcataccatcctaactctgtaagcgacttttggtgataggagtctgtgattgtagggtctcccttgatctgagaatggctacctctcgatatgagccagtggctgaaattggtgtcggtgcctatgggacagtgtacaaggcccgtgatccccacagtggccactttgtggccctcaagagtgtgagagtccccaatggaggaggaggtggaggaggccttcccatcagcacagttcgtgaggtggctttactgaggcgactggaggcttttgagcatcccaatgttgtccggtgagaaggtggtggagggttgggcgtggggagtaaagggaaaagacagcctataggtggggtgtgatgatctgtagagaagtggggaccctgaggaaataatgagaggccatgttgggttaaaggggattgaaaagtgagcatttactctggtcaggctgatggacgtctgtgccacatcccgaactgaccgggagatcaaggtaaccctggtgtttgagcatgtagaccaggacctaaggacatatctggacaaggcacccccaccaggcttgccagccgaaacgatcaaggtgagtggggttggtaggcattgagaggtggattgggacctttgtagtagaaccttctgggatttcaggtatggtgcctagtttccagtgcatctgtacctcccctttgaaactaggatctgatgcgccagtttctaagaggcctagatttccttcatgccaattgcatcgttcaccgagatctgaagccagagaacattctggtga

SEQ ID NO: 205 - DNA, 1136 bp, Homo sapiens
tggtggtgttctttgcgctttttttttgggagtccctttgttgctgcaggctcataccatcctaactctgtaagcgacttttggtgataggagtctgtgattgtagggtctcccttgatctgagaatggctacctctcgatatgagccagtggctgaaattggtgtcggtgcctatgggacagtgtacaaggcccgtgatccccacagtggccactttgtggccctcaagagtgtgagagtccccaatggaggaggaggtggaggaggccttcccatcagcacagttcgtgaggtggctttactgaggcgactggaggcttttgagcatcccaatgttgtccggtgagaaggtggtggagggttgggcgtggggagtaaagggaaaagacagcctataggtggggtgtgatgatctgtagagaagtggggaccctgaggaaataatgagaggccatgttgggttaaaggggattgaaaagtgagcatttactctggtcaggctgatggacgtctgtgccacatcccgaactgaccgggagatcaaggtaaccctggtgtttgagcatgtagaccaggacctaaggacatatctggacaaggcacccccaccaggcttgccagccgaaacgatcaaggtgagtggggttggtaggcattgagaggtggattgggacctttgtagtagaaccttctgggatttcaggtatggtgcctagtttccagtgcatctgtacctcccctttgaaactaggatctgatgcgccagtttctaagaggcctagatttccttcatgccaattgcatcgttcaccgagatctgaagccagagaacattctggtgacaagtggtggaacagtcaagctggctgactttggcctggccagaatctacagctaccagatggcacttacacccgtggtcagtagaaagatggtaccaaaatgggttctggttgggagtaggagagtgattgcccgtagcaattgagaagtcatgtgcttcatgtgttcagtcaagcaagttgtgtttcatggtaacccatggggtccccatccattcttcctattccctttaggttgttacactctggtaccgagctcccgaagttcttctgcagtccacatatgcaacacc

SEQ ID NO: 206 - DNA, 1168 bp, Homo sapiens
gaggaggtggaggaggccttcccatcagcacagttcgtgaggtggctttactgaggcgactggaggcttttgagcatcccaatgttgtccggtgagaaggtggtggagggttgggcgtggggagtaaagggaaaagacagcctataggtggggtgtgatgatctgtagagaagtggggaccctgaggaaataatgagaggccatgttgggttaaaggggattgaaaagtgagcatttactctggtcaggctgatggacgtctgtgccacatcccgaactgaccgggagatcaaggtaaccctggtgtttgagcatgtagaccaggacctaaggacatatctggacaaggcacccccaccaggcttgccagccgaaacgatcaaggtgagtggggttggtaggcattgagaggtggattgggacctttgtagtagaaccttctgggatttcaggtatggtgcctagtttccagtgcatctgtacctcccctttgaaactaggatctgatgcgccagtttctaagaggcctagatttccttcatgccaattgcatcgttcaccgagatctgaagccagagaacattctggtgacaagtggtggaacagtcaagctggctgactttggcctggccagaatctacagctaccagatggcacttacacccgtggtcagtagaaagatggtaccaaaatgggttctggttgggagtaggagagtgattgcccgtagcaattgagaagtcatgtgcttcatgtgttcagtcaagcaagttgtgtttcatggtaacccatggggtccccatccattcttcctattccctttaggttgttacactctggtaccgagctcccgaagttcttctgcagtccacatatgcaacacctgtggacatgtggagtgttggctgtatctttgcagagatgtttcgtcgaaagtatgggacccacataccctggactaccttgaattccccaaatcgcttgttcataaaccacatccataccttgcccattctttttttttgagaccagggcttgctgtgttgcccaggctggattgcaatggcatgatcacagctcactgcagcttcaacctcctgggctcaagtgatcctcccatctcagcttcccaactagctgacactacaggcacgcacctccatgcttg

SEQ ID NO: 207 - DNA, 1110 bp, Homo sapiens
acctaaggacatatctggacaaggcacccccaccaggcttgccagccgaaacgatcaaggtgagtggggttggtaggcattgagaggtggattgggacctttgtagtagaaccttctgggatttcaggtatggtgcctagtttccagtgcatctgtacctcccctttgaaactaggatctgatgcgccagtttctaagaggcctagatttccttcatgccaattgcatcgttcaccgagatctgaagccagagaacattctggtgacaagtggtggaacagtcaagctggctgactttggcctggccagaatctacagctaccagatggcacttacacccgtggtcagtagaaagatggtaccaaaatgggttctggttgggagtaggagagtgattgcccgtagcaattgagaagtcatgtgcttcatgtgttcagtcaagcaagttgtgtttcatggtaacccatggggtccccatccattcttcctattccctttaggttgttacactctggtaccgagctcccgaagttcttctgcagtccacatatgcaacacctgtggacatgtggagtgttggctgtatctttgcagagatgtttcgtcgaaagtatgggacccacataccctggactaccttgaattccccaaatcgcttgttcataaaccacatccataccttgcccattctttttttttgagaccagggcttgctgtgttgcccaggctggattgcaatggcatgatcacagctcactgcagcttcaacctcctgggctcaagtgatcctcccatctcagcttcccaactagctgacactacaggcacgcacctccatgcttggctagtttgttaatatttttatagagatggggtctcagtatattgcccaggctggtcttgaactcttgcactcaagcaatcctcccacccctacctcccaaagtagcataagctactgcatctggccccattcttttacttgcgtactactaacttgcccatagcagaaagctctgaaatgttctggaattaggaacttcatatccctttattctctttattttttatttatttatttatttatttatttatttatttatttattta

SEQ ID NO: 208 - DNA, 1051 bp, Homo sapiens
ttttttttttagatggagtcttgctctgtcgccaggctggagtgcagtagtgcgatctctgctcactgcaacctccacctcccagattcaagcaattctcttgactcagcctcccaagtagctgggaccacaggtgcacgccaccatgctcagctaatttttgtacttttagtaatgacagggtttcaccatgttggccaggatggtctcgatctcttgacctcatgatccacccacatcagactcccaaagtgctaggattacaggcgtgagccgctgcacctggcatttctttttttttaaaaaaagagacaaggtcttgcttgcccaggctgatctagaactcctgggctcaagcagtcctctcacctcagcatcccaaagtgctggaattgttggcctttattccctatacttcctattttgagccactaagcagtaaccattcaactaagatatctttgaaaatgactgctaccttatatcccttctcaccttaggcctctcttctgtggaaactctgaagccgaccagttgggcaaaatctttgagtaagtgaccaacatgggagaaaaagattttctattctgagtcctctttctgctgaacccaggatggcaactggctctgcccatggggatgggaactggaggaccctcctgaccagagttctcctgtcccccacagcctgattgggctgcctccagaggatgactggcctcgagatgtatccctgccccgtggagcctttccccccagagggccccgcccagtgcagtcggtggtacctgagatggaggagtcgggagcacagctgctgctggtactggagatggctgtgggcacagggaaagaaatagagactggggaaagaaatagagcagtatgcagggccctggccactgtggttaatgaaacttggttggtagatgggctgtagtttttattacagctgcaaatagccacccacagagaaggatatagaagagaacccatcctggctgggcacggtggctcacgcctgtaatcccagcactttgggaggccaagg

SEQ ID NO: 209 - DNA, 1136 bp, Homo sapiens
accatgttggccaggatggtctcgatctcttgacctcatgatccacccacatcagactcccaaagtgctaggattacaggcgtgagccgctgcacctggcatttctttttttttaaaaaaagagacaaggtcttgcttgcccaggctgatctagaactcctgggctcaagcagtcctctcacctcagcatcccaaagtgctggaattgttggcctttattccctatacttcctattttgagccactaagcagtaaccattcaactaagatatctttgaaaatgactgctaccttatatcccttctcaccttaggcctctcttctgtggaaactctgaagccgaccagttgggcaaaatctttgagtaagtgaccaacatgggagaaaaagattttctattctgagtcctctttctgctgaacccaggatggcaactggctctgcccatggggatgggaactggaggaccctcctgaccagagttctcctgtcccccacagcctgattgggctgcctccagaggatgactggcctcgagatgtatccctgccccgtggagcctttccccccagagggccccgcccagtgcagtcggtggtacctgagatggaggagtcgggagcacagctgctgctggtactggagatggctgtgggcacagggaaagaaatagagactggggaaagaaatagagcagtatgcagggccctggccactgtggttaatgaaacttggttggtagatgggctgtagtttttattacagctgcaaatagccacccacagagaaggatatagaagagaacccatcctggctgggcacggtggctcacgcctgtaatcccagcactttgggaggccaaggtgggcgtatcacctgaggtcaggagttcgagaccagcctggccaacatggtgaaacctcgtctctactaaaagtacaaaaataagccgggggtggtggcacacgcctgtaatctcagctacttgggaggctgagataggagaatcacttcaactcaggaggcggaggttgcagtgagctgagatcataccattgcactccagcctgggtgatagagcgagactccgtctcaaaaaaaaaaaaaaagaaaaaagaagaaagctcatcccaggt

SEQ ID NO: 210 - DNA, 1891 bp, Homo sapiens
gcagggccctggccactgtggttaatgaaacttggttggtagatgggctgtagtttttattacagctgcaaatagccacccacagagaaggatatagaagagaacccatcctggctgggcacggtggctcacgcctgtaatcccagcactttgggaggccaaggtgggcgtatcacctgaggtcaggagttcgagaccagcctggccaacatggtgaaacctcgtctctactaaaagtacaaaaataagccgggggtggtggcacacgcctgtaatctcagctacttgggaggctgagataggagaatcacttcaactcaggaggcggaggttgcagtgagctgagatcataccattgcactccagcctgggtgatagagcgagactccgtctcaaaaaaaaaaaaaaagaaaaaagaagaaagctcatcccaggtattgttgtgggtgggcagaagtctgttttcttcatggttttctgacctttgcctctcccctcaggaaatgctgacttttaacccacacaagcgaatctctgcctttcgagctctgcagcactcttatctacataaggatgaaggtaatccggagtgagcaatggagtggctgccatggaaggaagaaaagctgccatttcccttctggacactgagagggcaatctttgcctttatctctgaggctatggagggtcctcctccatctttctacagagattactttgctgccttaatgacattcccctcccacctctccttttgaggcttctccttctccttcccatttctctacactaaggggtatgttccctcttgtccctttccctacctttatatttggggtccttttttatacaggaaaaacaaaacaaagaaataatggtcttttttttttttttaatgtttcttcctctgtttggctttgccattgtgcgatttggaaaaaccacttggaagaagggactttcctgcaaaaccttaaagactggttaaattacagggcctaggaagtcagtggagccccttgactgacaaagcttagaaaggaactgaaattgcttctttgaatatggattttaggcggggcgtggtggctcacgcctataatcccagcacgttgggaggccaacgcgggtggatcacctgaggtcaggagttcgagaccagcctgactaacatggtgaaaccctgtctctactaaaaatacaaaattagtcaggcgtggtggtgcacacctgtaatcccagctacttgggagactgaggcaggaggatcgcttgaacccgggaggcagaggttgcggtgagccgagatcatgccattgcactccagcctgggcaacagagcaagactctgtgtcaaaaaaaaaaaaagaatatagatttttaaatggcttttacttttatattcgctaaactttctcaaactggatcctgcttattacaggaaagagttcttggttgttttctccttggccctatccctgatttacccttagagccacaccagggtatgttgaggtgatccagtatatggacagaggaagggaaacagctaagaatgactccagcccccatcctatgcactcacagaagcttcccatatcctcttggagagagaggaagaaagtttttccttttattccttatagtctggctcccactaaaatatgtcaaggcataaagtcttgctattccatcaattttagaggatgtgacaaggggcctttcctttttctcaaaccaaaacggttacagaccctagatattccctaagggaggaagagaaagcttagagagagcagaagaaaagtcagaaggatccaaagtctcatagaaaggcactggggttggctctaggatccttctgattccgaaatctcattgctagccaa

SEQ ID NO: 211 - DNA, 1500 bp, Homo sapiens
tttttaatgtttcttcctctgtttggctttgccattgtgcgatttggaaaaaccacttggaagaagggactttcctgcaaaaccttaaagactggttaaattacagggcctaggaagtcagtggagccccttgactgacaaagcttagaaaggaactgaaattgcttctttgaatatggattttaggcggggcgtggtggctcacgcctataatcccagcacgttgggaggccaacgcgggtggatcacctgaggtcaggagttcgagaccagcctgactaacatggtgaaaccctgtctctactaaaaatacaaaattagtcaggcgtggtggtgcacacctgtaatcccagctacttgggagactgaggcaggaggatcgcttgaacccgggaggcagaggttgcggtgagccgagatcatgccattgcactccagcctgggcaacagagcaagactctgtgtcaaaaaaaaaaaaagaatatagatttttaaatggcttttacttttatattcgctaaactttctcaaactggatcctgcttattacaggaaagagttcttggttgttttctccttggccctatccctgatttacccttagagccacaccagggtatgttgaggtgatccagtatatggacagaggaagggaaacagctaagaatgactccagcccccatcctatgcactcacagaagcttcccatatcctcttggagagagaggaagaaagtttttccttttattccttatagtctggctcccactaaaatatgtcaaggcataaagtcttgctattccatcaattttagaggatgtgacaaggggcctttcctttttctcaaaccaaaacggttacagaccctagatattccctaagggaggaagagaaagcttagagagagcagaagaaaagtcagaaggatccaaagtctcatagaaaggcactggggttggctctaggatccttctgattccgaaatctcattgctagccaaacaccaaggatctgtaggaacaaagggagagagataagtatcaattaattctcagtctcaaaaaggatgtgtgtgagggaactggagaatgttacctctgtaaagctaaagaagagtccaacaccccctaggattttcagggcttcgtctgaatgcttaagaaacttttctccacacatctggcatgtggggctctggctcttgcagatctgaggataaaacgtgaagaatgcaaagttgtgaatgtaaagttgctagtgactaatacctatgccgaatgtccctagaaactttactgttatctgaccagtgtcctacaaactaaaatcctacttggctaattccccagcctctatccacccccacctcccaccaacacagccccaatacaagagggcttgtagagagagaaacaatgacattcaaactaaatttgccaacttgggcattgtccttacccagtttcctacctcccctggctgctgcaccacccccaacac

SEQ ID NO: 212 - DNA, 1267 bp, Homo sapiens
cgagggctgcttccggctggtgcccccgggggagacccaacctggggcgacttcaggggtgccacattcgctaagtgctcggagttaatagcacctcctccgagcactcgctcacggcgtccccttgcctggaaagataccgcggtccctccagaggatttgagggacagggtcggagggggctcttccgccagcaccggaggaagaaagaggaggggctggctggtcaccagagggtggggcggaccgcgtgcgctcggcggctgcggagagggggagagcaggcagcgggcggcggggagcagcatggagccggcggcggggagcagcatggagccttcggctgactggctggccacggccgcggcccggggtcgggtagaggaggtgcgggcgctgctggaggcgggggcgctgcccaacgcaccgaatagttacggtcggaggccgatccaggtcatgatgatgggcagcgcccgagtggcggagctgctgctgctccacggcgcggagcccaactgcgccgaccccgccactctcacccgacccgtgcacgacgctgcccgggagggcttcctggacacgctggtggtgctgcaccgggccggggcgcggctggacgtgcgcgatgcctggggccgtctgcccgtggacctggctgaggagctgggccatcgcgatgtcgcacggtacctgcgcgcggctgcggggggcaccagaggcagtaaccatgcccgcatagatgccgcggaaggtccctcagacatccccgattgaaagaaccagagaggctctgagaaacctcgggaaacttagatcatcagtcaccgaaggtcctacagggccacaactgcccccgccacaacccaccccgctttcgtagttttcatttagaaaatagagcttttaaaaatgtcctgccttttaacgtagatatatgccttcccccactaccgtaaatgtccatttatatcattttttatatattcttataaaaatgtaaaaaagaaaaacaccgcttctgccttttcactgtgttggagttttctggagtgagcactcacgccctaagcgcacattcatgtgggcatttcttgcgagcctcgcagcctccggaagctgtcgacttcatgacaagcattttgtgaactagggaagctcaggggggttactggcttctcttgagtcacactgctagcaaatggcagaaccaaagctcaaataaaaataaaataattttcattcattcactcaaaaaaaaaaaaaa

SEQ ID NO: 213 - DNA, 1235 bp, Homo sapiens
atggagccggcggcggggagcagcatggagccttcggctgactggctggccacggccgcggcccggggtcgggtagaggaggtgcgggcgctgctggaggcgggggcgctgcccaacgcaccgaatagttacggtcggaggccgatccaggtgggtagagggtctgcagcgggagcaggggatggcgggcgactctggaggacgaagtttgcaggggaattggaatcaggtagcgcttcgattctccggaaaaaggggaggcttcctggggagttttcagaaggggtttgtaatcacagacctcctcctggcgacgccctgggggcttgggaagccaaggaagaggaatgaggagccacgcgcgtacagatctctcgaatgctgagaagatctgaaggggggaacatatttgtattagatggaagtcatgatgatgggcagcgcccgagtggcggagctgctgctgctccacggcgcggagcccaactgcgccgaccccgccactctcacccgacccgtgcacgacgctgcccgggagggcttcctggacacgctggtggtgctgcaccgggccggggcgcggctggacgtgcgcgatgcctggggccgtctgcccgtggacctggctgaggagctgggccatcgcgatgtcgcacggtacctgcgcgcggctgcggggggcaccagaggcagtaaccatgcccgcatagatgccgcggaaggtccctcagacatccccgattgaaagaaccagagaggctctgagaaacctcgggaaacttagatcatcagtcaccgaaggtcctacagggccacaactgcccccgccacaacccaccccgctttcgtagttttcatttagaaaatagagcttttaaaaatgtcctgccttttaacgtagatatatgccttcccccactaccgtaaatgtccatttatatcattttttatatattcttataaaaatgtaaaaaagaaaaacaccgcttctgccttttcactgtgttggagttttctggagtgagcactcacgccctaagcgcacattcatgtgggcatttcttgcgagcctcgcagcctccggaagctgtcgacttcatgacaagcattttgtgaactagggaagctcaggggggttactggcttctcttgagtcacactgctagcaaatggcagaaccaaagctcaaataaaaataaaataattttcattcattcactcaaaaaaaaaaaaaa

SEQ ID NO: 214 - DNA, 1164 bp, Homo sapiens
cgctcagggaaggcgggtgcgcgcctgcggggcggagatgggcagggggcggtgcgtgggtcccagtctgcagttaagggggcaggagtggcgctgctcacctctggtgccaaagggcggcgcagcggctgccgagctcggccctggaggcggcgagaacatggtgcgcaggttcttggtgaccctccggattcggcgcgcgtgcggcccgccgcgagtgagggttttcgtggttcacatcccgcggctcacgggggagtgggcagcgccaggggcgcccgccgctgtggccctcgtgctgatgctactgaggagccagcgtctagggcagcagccgcttcctagaagaccaggtcatgatgatgggcagcgcccgagtggcggagctgctgctgctccacggcgcggagcccaactgcgccgaccccgccactctcacccgacccgtgcacgacgctgcccgggagggcttcctggacacgctggtggtgctgcaccgggccggggcgcggctggacgtgcgcgatgcctggggccgtctgcccgtggacctggctgaggagctgggccatcgcgatgtcgcacggtacctgcgcgcggctgcggggggcaccagaggcagtaaccatgcccgcatagatgccgcggaaggtccctcagacatccccgattgaaagaaccagagaggctctgagaaacctcgggaaacttagatcatcagtcaccgaaggtcctacagggccacaactgcccccgccacaacccaccccgctttcgtagttttcatttagaaaatagagcttttaaaaatgtcctgccttttaacgtagatatatgccttcccccactaccgtaaatgtccatttatatcattttttatatattcttataaaaatgtaaaaaagaaaaacaccgcttctgccttttcactgtgttggagttttctggagtgagcactcacgccctaagcgcacattcatgtgggcatttcttgcgagcctcgcagcctccggaagctgtcgacttcatgacaagcattttgtgaactagggaagctcaggggggttactggcttctcttgagtcacactgctagcaaatggcagaaccaaagctcaaataaaaataaaataattttcattcattcactcaaaaaaaaaaaaaa

SEQ ID NO: 215 - DNA, 1464 bp, Homo sapiens
cgagggctgcttccggctggtgcccccgggggagacccaacctggggcgacttcaggggtgccacattcgctaagtgctcggagttaatagcacctcctccgagcactcgctcacggcgtccccttgcctggaaagataccgcggtccctccagaggatttgagggacagggtcggagggggctcttccgccagcaccggaggaagaaagaggaggggctggctggtcaccagagggtggggcggaccgcgtgcgctcggcggctgcggagagggggagagcaggcagcgggcggcggggagcagcatggagccggcggcggggagcagcatggagccttcggctgactggctggccacggccgcggcccggggtcgggtagaggaggtgcgggcgctgctggaggcgggggcgctgcccaacgcaccgaatagttacggtcggaggccgatccaggtcatgatgatgggcagcgcccgagtggcggagctgctgctgctccacggcgcggagcccaactgcgccgaccccgccactctcacccgacccgtgcacgacgctgcccgggagggcttcctggacacgctggtggtgctgcaccgggccggggcgcggctggacgtgcgcgatgcctggggccgtctgcccgtggacctggctgaggagctgggccatcgcgatgtcgcacggtacctgcgcgcggctgcggggggcaccagaggcagtaaccatgcccgcatagatgccgcggaaggtccctcagaaatgatcggaaaccatttgtgggtttgtagaagcaggcatgcgtagggaagctacgggattccgccgaggagcgccagagcctgaggcgccctttggttatcgcaagctggctggctcactccgcaccaggtgcaaaagatgcctggggatgcgggaagggaaaggccacatcttcacgccttcgcgcctggcattacatccccgattgaaagaaccagagaggctctgagaaacctcgggaaacttagatcatcagtcaccgaaggtcctacagggccacaactgcccccgccacaacccaccccgctttcgtagttttcatttagaaaatagagcttttaaaaatgtcctgccttttaacgtagatatatgccttcccccactaccgtaaatgtccatttatatcattttttatatattcttataaaaatgtaaaaaagaaaaacaccgcttctgccttttcactgtgttggagttttctggagtgagcactcacgccctaagcgcacattcatgtgggcatttcttgcgagcctcgcagcctccggaagctgtcgacttcatgacaagcattttgtgaactagggaagctcaggggggttactggcttctcttgagtcacactgctagcaaatggcagaaccaaagctcaaataaaaataaaataattttcattcattcactcaaaaaaaaaaaaaa

SEQ ID NO: 216 - DNA, 1500 bp, Homo sapiens
gtgctgggattacaggtgtgagccaccgcgtcctgctccaaagcattttctttctatgcctcaaaacaagattgcaagccagtcctcaaagcggataattcaagagctaacaggtattagcttaggatgtgtggcactgttcttaaggcttatatgtattaatacatcatttaaactcacaacaacccctataaagcagggggcactcatattcccttccccctttataattacgaaaaatgcaaggtattttcagtaggaaagagaaatgtgagaagtgtgaaggagacaggacagtatttgaagctggtctttggatcactgtgcaactctgcttctagaacactgagcactttttctggtctaggaattatgactttgagaatggagtccgtccttccaatgactccctccccattttcctatctgcctacaggcagaattctcccccgtccgtattaaataaacctcatcttttcagagtctgctcttataccaggcaatgtacacgtctgagaaacccttgccccagacagccgttttacacgcaggaggggaaggggaggggaaggagagagcagtccgactctccaaaaggaatcctttgaactagggtttctgacttagtgaaccccgcgctcctgaaaatcaagggttgagggggtagggggacactttctagtcgtacaggtgatttcgattctcggtggggctctcacaactaggaaagaatagttttgctttttcttatgattaaaagaagaagccatactttccctatgacaccaaacaccccgattcaatttggcagttaggaaggttgtatcgcggaggaaggaaacggggcgggggcggatttctttttaacagagtgaacgcactcaaacacgcctttgctggcaggcgggggagcgcggctgggagcagggaggccggagggcggtgtggggggcaggtggggaggagcccagtcctccttccttgccaacgctggctctggcgagggctgcttccggctggtgcccccgggggagacccaacctggggcgacttcaggggtgccacattcgctaagtgctcggagttaatagcacctcctccgagcactcgctcacggcgtccccttgcctggaaagataccgcggtccctccagaggatttgagggacagggtcggagggggctcttccgccagcaccggaggaagaaagaggaggggctggctggtcaccagagggtggggcggaccgcgtgcgctcggcggctgcggagagggggagagcaggcagcgggcggcggggagcagcatggagccggcggcggggagcagcatggagccttcggctgactggctggccacggccgcggcccggggtcgggtagaggaggtgcgggcgctgctggaggcgggggcgctgcccaacgcaccgaatagttacggtcggaggccgatccaggtgggtagagggtctgcagcgggagcaggggatggcgggcgact

SEQ ID NO: 217 - DNA, 1456 bp, Homo sapiens
caatgtacacgtctgagaaacccttgccccagacagccgttttacacgcaggaggggaaggggaggggaaggagagagcagtccgactctccaaaaggaatcctttgaactagggtttctgacttagtgaaccccgcgctcctgaaaatcaagggttgagggggtagggggacactttctagtcgtacaggtgatttcgattctcggtggggctctcacaactaggaaagaatagttttgctttttcttatgattaaaagaagaagccatactttccctatgacaccaaacaccccgattcaatttggcagttaggaaggttgtatcgcggaggaaggaaacggggcgggggcggatttctttttaacagagtgaacgcactcaaacacgcctttgctggcaggcgggggagcgcggctgggagcagggaggccggagggcggtgtggggggcaggtggggaggagcccagtcctccttccttgccaacgctggctctggcgagggctgcttccggctggtgcccccgggggagacccaacctggggcgacttcaggggtgccacattcgctaagtgctcggagttaatagcacctcctccgagcactcgctcacggcgtccccttgcctggaaagataccgcggtccctccagaggatttgagggacagggtcggagggggctcttccgccagcaccggaggaagaaagaggaggggctggctggtcaccagagggtggggcggaccgcgtgcgctcggcggctgcggagagggggagagcaggcagcgggcggcggggagcagcatggagccggcggcggggagcagcatggagccttcggctgactggctggccacggccgcggcccggggtcgggtagaggaggtgcgggcgctgctggaggcgggggcgctgcccaacgcaccgaatagttacggtcggaggccgatccaggtgggtagagggtctgcagcgggagcaggggatggcgggcgactctggaggacgaagtttgcaggggaattggaatcaggtagcgcttcgattctccggaaaaaggggaggcttcctggggagttttcagaaggggtttgtaatcacagacctcctcctggcgacgccctgggggcttgggaagccaaggaagaggaatgaggagccacgcgcgtacagatctctcgaatgctgagaagatctgaaggggggaacatatttgtattagatggaagtatgctctttatcagatacaaaatttacgaacgtttgggataaaaagggagtcttaaagaaatgtaagatgtgctgggactacttagcctccaattcacagatacctggatggagcttatctttcttactaggagggattatcagtggaaatctgtggtgtatgttggaataaatatcgaatataaattttgatcgaaattattcagaagcggccgggcgcggtg

SEQ ID NO: 218 - DNA, 1307 bp, Homo sapiens
cattcccagaagctaagtgtaacttaaaagttttgtgagaatttgttttaacaaacaaacaagttttctctttttaacaattaccacattctgcgcttggatatacagcagtgaacaaaaaaaaaaaaaaaaatctccaggcctaacataatttcaggaagaaatttcagtagttgtatctcaggggaaatacaggaagttagcctggagtaaaagtcagtctgtccctgcccctttgctattttgcccgtgcctcacagtgctctctgcctgtgacgacagctccgcagaagttcggaggatataatggaattcattgtgtactgaagaatggatagagaactcaagaaggaaattggaaactggaagcaaatgtaggggtaattagacacctggggcttgtgtgggggtctgcttggcggtgagggggctctacacaagcttcctttccgtcatgccggcccccaccctggctctgaccattctgttctctctggcaggtcatgatgatgggcagcgcccgagtggcggagctgctgctgctccacggcgcggagcccaactgcgccgaccccgccactctcacccgacccgtgcacgacgctgcccgggagggcttcctggacacgctggtggtgctgcaccgggccggggcgcggctggacgtgcgcgatgcctggggccgtctgcccgtggacctggctgaggagctgggccatcgcgatgtcgcacggtacctgcgcgcggctgcggggggcaccagaggcagtaaccatgcccgcatagatgccgcggaaggtccctcaggtgaggactgatgatctgagaatttgtaccctgagagcttccaaagctcagagcattcattttccagcacagaaagttcagcccgggagaccagtctccggtcttgcctcagctcacgcgccaatcggtgggacggcctgagtctccctatcgccctgccccgccagggcggcaaatgggaaataatcccgaaatggacttgcgcacgtgaaagcccattttgtacattatacttcccaaagcataccaccacccaaacacctaccctctgctagttcaaggcctagactgcggagcaatgaagactcaagaggctagaggtctagtgccccctcttcctccaaactagggccagttgcatccacttaccaggtctgtttcctcatttgcataccaagctggctggaccaacctcaggatttccaaacccaattgtgcgtggcatcatctggagatctctcgatctcggctcttctgcacaactcaactaatctgaccct

SEQ ID NO: 219 - DNA, 1197 bp, Homo sapiens
ggaccacaggtgcacgccacgacgcctgggtttgtttgtttgtttaatagagacgaaggtctcaccatgttatctgggctcaagcgatcatcccccctcctcctcctaaagtactgggattacagtcccaagctatcttgcccgacctgggaaacagacgttaaggaagataacaatctattttcagagagcgagtttataaaaccaatgcaatgggtaaatatgaagtgtgaataggaggagaagctaaagagtggtcggagaatctaatgcaagctacgggagaaagaaactcaagtgcaaatgctgcctcaggaataaacgtaaaaagagactttcaagtgcaaatgctccctcaggaataaaataatcttgagactctcaagtgtaaatgctgcctcgggagaaccgaacggcgagctggagcccatacgcaacgagattagagaggaaggcagaagccagagcacatgaataaatgagcatccattttgtttcagaaatgatcggaaaccatttgtgggtttgtagaagcaggcatgcgtagggaagctacgggattccgccgaggagcgccagagcctgaggcgccctttggttatcgcaagctggctggctcactccgcaccaggtgcaaaagatgcctggggatgcgggaagggaaaggccacatcttcacgccttcgcgcctggcattgtgagcaaccactgagactcattatataacactcgttttcttcttgcaaccctgcgggccgcgcggtcgcgctttctctgccctccgccgggtggacctggagcgcttgagcggtcggcgcgcctggagcagccaggcgggcagtggactagctgctggaccagggaggtgtgggagagcggtggcggcgggtacatgcacgtgaagccattgcgagaactttatccataagtatttcaatgccggtagggacggcaagagaggagggcgggatgtgccacacatctttgacctcaggtttctaacgcctgttttctttctgccctctgcagacatccccgattgaaagaaccagagaggctctgagaaacctcgggaaacttagatcatcagtcaccgaaggtcctacagggccacaactgcccccgccacaacccaccccgctttcgtagttttcatttagaaaatagagcttttaaaaatgtcctgccttttaacgt

SEQ ID NO: 220 - DNA, 1491 bp, Homo sapiens
agaagcaggcatgcgtagggaagctacgggattccgccgaggagcgccagagcctgaggcgccctttggttatcgcaagctggctggctcactccgcaccaggtgcaaaagatgcctggggatgcgggaagggaaaggccacatcttcacgccttcgcgcctggcattgtgagcaaccactgagactcattatataacactcgttttcttcttgcaaccctgcgggccgcgcggtcgcgctttctctgccctccgccgggtggacctggagcgcttgagcggtcggcgcgcctggagcagccaggcgggcagtggactagctgctggaccagggaggtgtgggagagcggtggcggcgggtacatgcacgtgaagccattgcgagaactttatccataagtatttcaatgccggtagggacggcaagagaggagggcgggatgtgccacacatctttgacctcaggtttctaacgcctgttttctttctgccctctgcagacatccccgattgaaagaaccagagaggctctgagaaacctcgggaaacttagatcatcagtcaccgaaggtcctacagggccacaactgcccccgccacaacccaccccgctttcgtagttttcatttagaaaatagagcttttaaaaatgtcctgccttttaacgtagatatatgccttcccccactaccgtaaatgtccatttatatcattttttatatattcttataaaaatgtaaaaaagaaaaacaccgcttctgccttttcactgtgttggagttttctggagtgagcactcacgccctaagcgcacattcatgtgggcatttcttgcgagcctcgcagcctccggaagctgtcgacttcatgacaagcattttgtgaactagggaagctcaggggggttactggcttctcttgagtcacactgctagcaaatggcagaaccaaagctcaaataaaaataaaataattttcattcattcactcatttattgtcaacatttattgagcacctattacaacaatttcatcgcatggaagacagcatcgtttctgacactgttgtttcatgtatctcttagaaaaacgctgctattagacatctaacactatttatcttgaggtgataaaatatcaaaagccgtgtctcaagatcgatgaaatgcggttaaaatgatgaatagaaactctagggggacctcatatcgatagactcgagactggcacatctggagatccgtatttatccggcttccccttccagatcacgcgaggtttgggatattttgctcaccaggcctcagccaggtaactgaatccagccaaccctggcccatagtctcggaatccgactcggctcccagtccccgcctcggcgttctgagacccccaggctggggttccagagggctgtgaggttgcgaatgactgctgccaaaccggaaggaactctgcggttctctgccacagtgggattgttgcaggcac

SEQ ID NO: 221 - DNA, 1500 bp, Homo sapiens
cctctgcagacatccccgattgaaagaaccagagaggctctgagaaacctcgggaaacttagatcatcagtcaccgaaggtcctacagggccacaactgcccccgccacaacccaccccgctttcgtagttttcatttagaaaatagagcttttaaaaatgtcctgccttttaacgtagatatatgccttcccccactaccgtaaatgtccatttatatcattttttatatattcttataaaaatgtaaaaaagaaaaacaccgcttctgccttttcactgtgttggagttttctggagtgagcactcacgccctaagcgcacattcatgtgggcatttcttgcgagcctcgcagcctccggaagctgtcgacttcatgacaagcattttgtgaactagggaagctcaggggggttactggcttctcttgagtcacactgctagcaaatggcagaaccaaagctcaaataaaaataaaataattttcattcattcactcatttattgtcaacatttattgagcacctattacaacaatttcatcgcatggaagacagcatcgtttctgacactgttgtttcatgtatctcttagaaaaacgctgctattagacatctaacactatttatcttgaggtgataaaatatcaaaagccgtgtctcaagatcgatgaaatgcggttaaaatgatgaatagaaactctagggggacctcatatcgatagactcgagactggcacatctggagatccgtatttatccggcttccccttccagatcacgcgaggtttgggatattttgctcaccaggcctcagccaggtaactgaatccagccaaccctggcccatagtctcggaatccgactcggctcccagtccccgcctcggcgttctgagacccccaggctggggttccagagggctgtgaggttgcgaatgactgctgccaaaccggaaggaactctgcggttctctgccacagtgggattgttgcaggcacgcggctcagacttcactgaggttgggagatgctcctgtccacgctgcctcatcccgtgctggagcactgcacctctatttttttttttagggtacacgccacataacataaaactaaaaattttaaagagtagaattcagtggcatttagtacaatgttatgcaaccatcactcctatctagcccaaaacattttcgtcaactgcataggaggccccattaagcatacctgttaaactcttcttgcctccaactcctggcaactacaaaactccttttgtctctatggatttacctattctgaatatttcttataaatgggatcatacaatatgtgaccttccgtgtctggcttctttcaccaagtgtagtgttttgggggttcattcctgctgcagcatgtatcagtacctcatttcattttatggctgaatcatattccattgtatgaatatactggaaattgctcgtctactcatccagtgatgaacatcgagttgt

SEQ ID NO: 222 - DNA, 2591 bp, Homo sapiens
cggaggtgcgcgggcgcgggcgagcagggtctccgggtgggcggcggcgacgccccgcgcaggctggaggccgccgaggctcgccatgccgggagaactctaactcccccatggagtcggccgacttctacgaggcggagccgcggcccccgatgagcagccacctgcagagccccccgcacgcgcccagcagcgccgccttcggctttccccggggcgcgggccccgcgcagcctcccgccccacctgccgccccggagccgctgggcggcatctgcgagcacgagacgtccatcgacatcagcgcctacatcgacccggccgccttcaacgacgagttcctggccgacctgttccagcacagccggcagcaggagaaggccaaggcggccgtgggccccacgggcggcggcggcggcggcgactttgactacccgggcgcgcccgcgggccccggcggcgccgtcatgcccgggggagcgcacgggcccccgcccggctacggctgcgcggccgccggctacctggacggcaggctggagcccctgtacgagcgcgtcggggcgccggcgctgcggccgctggtgatcaagcaggagccccgcgaggaggatgaagccaagcagctggcgctggccggcctcttcccttaccagccgccgccgccgccgccgccctcgcacccgcacccgcacccgccgcccgcgcacctggccgccccgcacctgcagttccagatcgcgcactgcggccagaccaccatgcacctgcagcccggtcaccccacgccgccgcccacgcccgtgcccagcccgcaccccgcgcccgcgctcggtgccgccggcctgccgggccctggcagcgcgctcaaggggctgggcgccgcgcaccccgacctccgcgcgagtggcggcagcggcgcgggcaaggccaagaagtcggtggacaagaacagcaacgagtaccgggtgcggcgcgagcgcaacaacatcgcggtgcgcaagagccgcgacaaggccaagcagcgcaacgtggagacgcagcagaaggtgctggagctgaccagtgacaatgaccgcctgcgcaagcgggtggaacagctgagccgcgaactggacacgctgcggggcatcttccgccagctgccagagagctccttggtcaaggccatgggcaactgcgcgtgaggcgcgcggctgtgggaccgccctgggccagcctccggcggggacccagggagtggtttggggtcgccggatctcgaggcttgcccgagccgtgcgagccaggactaggagattccggtgcctcctgaaagcctggcctgctccgcgtgtcccctcccttcctctgcgccggacttggtgcgtctaagatgagggggccaggcggtggcttctccctgcgaggaggggagaattcttggggctgagctgggagcccggcaactctagtatttaggataaccttgtgccttggaaatgcaaactcaccgctccaatgcctactgagtagggggagcaaatcgtgccttgtcattttatttggaggtttcctgcctccttcccgaggctacagcagacccccatgagagaaggaggggagcaggcccgtggcaggaggagggctcagggagctgagatcccgacaagcccgccagccccagccgctcctccacgcctgtccttagaaaggggtggaaacatagggacttggggcttggaacctaaggttgttcccctagttctacatgaaggtggagggtctctagttccacgcctctcccacctccctccgcacacaccccaccccagcctgctataggctgggcttccccttggggcggaactcactgcgatgggggtcaccaggtgaccagtgggagcccccaccccgagtcacaccagaaagctaggtcgtgggtcagctctgaggatgtatacccctggtgggagagggagacctagagatctggctgtggggcgggcatggggggtgaagggccactgggaccctcagccttgtttgtactgtatgccttcagcattgcctaggaacacgaagcacgatcagtccatcccagagggaccggagttatgacaagctttccaaatattttgctttatcagccgatatcaacacttgtatctggcctctgtgccccagcagtgccttgtgcaatgtgaatgtgcgcgtctctgctaaaccaccattttatttggtttttgttttgttttggttttgctcggatacttgccaaaatgagactctccgtcggcagctgggggaagggtctgagactccctttccttttggttttgggattacttttgatcctgggggaccaatgaggtgaggggggttctcctttgccctcagctttccccagcccctccggcctgggctgcccacaaggcttgtcccccagaggccctggctcctggtcgggaagggaggtggcctcccgccaacgcatcactggggctgggagcagggaaggacggcttggttctcttcttttggggagaacgtagagtctcactctagatgttttatgtattatatctataatataaacatatcaaagtcaa

SEQ ID NO: 223 - DNA, 1862 bp, Homo sapiens
gcaggtttagcgccactctgctggctgaggctgcggagagtgtgcggctccaggtgggctcacgcggtcgtgatgtctcgggagtcggatgttgaggctcagcagtctcatggcagcagtgcctgttcacagccccatggcagcgttacccagtcccaaggctcctcctcacagtcccagggcatatccagctcctctaccagcacgatgccaaactccagccagtcctctcactccagctctgggacactgagctccttagagacagtgtccactcaggaactctattctattcctgaggaccaagaacctgaggaccaagaacctgaggagcctacccctgccccctgggctcgattatgggcccttcaggatggatttgccaatcttgaatgtgtgaatgacaactactggtttgggagggacaaaagctgtgaatattgctttgatgaaccactgctgaaaagaacagataaataccgaacatacagcaagaaacactttcggattttcagggaagtgggtcctaaaaactcttacattgcatacatagaagatcacagtggcaatggaacctttgtaaatacagagcttgtagggaaaggaaaacgccgtcctttgaataacaattctgaaattgcactgtcactaagcagaaataaagtttttgtcttttttgatctgactgtagatgatcagtcagtttatcctaaggcattaagagatgaatacatcatgtcaaaaactcttggaagtggtgcctgtggagaggtaaagctggctttcgagaggaaaacatgtaagaaagtagccataaagatcatcagcaaaaggaagtttgctattggttcagcaagagaggcagacccagctctcaatgttgaaacagaaatagaaattttgaaaaagctaaatcatccttgcatcatcaagattaaaaacttttttgatgcagaagattattatattgttttggaattgatggaagggggagagctgtttgacaaagtggtggggaataaacgcctgaaagaagctacctgcaagctctatttttaccagatgctcttggctgtgcagtaccttcatgaaaacggtattatacaccgtgacttaaagccagagaatgttttactgtcatctcaagaagaggactgtcttataaagattactgattttgggcactccaagattttgggagagacctctctcatgagaaccttatgtggaacccccacctacttggcgcctgaagttcttgtttctgttgggactgctgggtataaccgtgctgtggactgctggagtttaggagttattctttttatctgccttagtgggtatccacctttctctgagcataggactcaagtgtcactgaaggatcagatcaccagtggaaaatacaacttcattcctgaagtctgggcagaagtctcagagaaagctctggaccttgtcaagaagttgttggtagtggatccaaaggcacgttttacgacagaagaagccttaagacacccgtggcttcaggatgaagacatgaagagaaagtttcaagatcttctgtctgaggaaaatgaatccacagctctaccccaggttctagcccagccttctactagtcgaaagcggccccgtgaaggggaagccgagggtgccgagaccacaaagcgcccagctgtgtgtgctgctgtgttgtgaactccgtggtttgaacacgaaagaaatgtaccttctttcactctgtcatctttcttttctttgagtctgtttttttatagtttgtattttaattatgggaataattgctttttcacagtcactgatgtacaattaaaaacctgatggaacctggaaaa

SEQ ID NO: 224 - DNA, 1775 bp, Homo sapiens
gcaggtttagcgccactctgctggctgaggctgcggagagtgtgcggctccaggtgggctcacgcggtcgtgatgtctcgggagtcggatgttgaggctcagcagtctcatggcagcagtgcctgttcacagccccatggcagcgttacccagtcccaaggctcctcctcacagtcccagggcatatccagctcctctaccagcacgatgccaaactccagccagtcctctcactccagctctgggacactgagctccttagagacagtgtccactcaggaactctattctattcctgaggaccaagaacctgaggaccaagaacctgaggagcctacccctgccccctgggctcgattatgggcccttcaggatggatttgccaatcttgaatgtgtgaatgacaactactggtttgggagggacaaaagctgtgaatattgctttgatgaaccactgctgaaaagaacagataaataccgaacatacagcaagaaacactttcggattttcagggaagtgggtcctaaaaactcttacattgcatacatagaagatcacagtggcaatggaacctttgtaaatacagagcttgtagggaaaggaaaacgccgtcctttgaataacaattctgaaattgcactgtcactaagcagaaataaagtttttgtcttttttgatctgactgtagatgatcagtcagtttatcctaaggcattaagagatgaatacatcatgtcaaaaactcttggaagtggtgcctgtggagaggtaaagctggctttcgagaggaaaacatgtaagaaagtagccataaagatcatcagcaaaaggaagtttgctattggttcagcaagagaggcagacccagctctcaatgttgaaacagaaatagaaattttgaaaaagctaaatcatccttgcatcatcaagattaaaaacttttttgatgcagaagattattatattgttttggaattgatggaagggggagagctgtttgacaaagtggtggggaataaacgcctgaaagaagctacctgcaagctctatttttaccagatgctcttggctgtgcagattactgattttgggcactccaagattttgggagagacctctctcatgagaaccttatgtggaacccccacctacttggcgcctgaagttcttgtttctgttgggactgctgggtataaccgtgctgtggactgctggagtttaggagttattctttttatctgccttagtgggtatccacctttctctgagcataggactcaagtgtcactgaaggatcagatcaccagtggaaaatacaacttcattcctgaagtctgggcagaagtctcagagaaagctctggaccttgtcaagaagttgttggtagtggatccaaaggcacgttttacgacagaagaagccttaagacacccgtggcttcaggatgaagacatgaagagaaagtttcaagatcttctgtctgaggaaaatgaatccacagctctaccccaggttctagcccagccttctactagtcgaaagcggccccgtgaaggggaagccgagggtgccgagaccacaaagcgcccagctgtgtgtgctgctgtgttgtgaactccgtggtttgaacacgaaagaaatgtaccttctttcactctgtcatctttcttttctttgagtctgtttttttatagtttgtattttaattatgggaataattgctttttcacagtcactgatgtacaattaaaaacctgatggaacctggaaaa

SEQ ID NO: 225 - DNA, 1991 bp, Homo sapiens
gcaggtttagcgccactctgctggctgaggctgcggagagtgtgcggctccaggtgggctcacgcggtcgtgatgtctcgggagtcggatgttgaggctcagcagtctcatggcagcagtgcctgttcacagccccatggcagcgttacccagtcccaaggctcctcctcacagtcccagggcatatccagctcctctaccagcacgatgccaaactccagccagtcctctcactccagctctgggacactgagctccttagagacagtgtccactcaggaactctattctattcctgaggaccaagaacctgaggaccaagaacctgaggagcctacccctgccccctgggctcgattatgggcccttcaggatggatttgccaatcttgagacagagtctggccatgttacccaatctgatcttgaactcctgctgtcatctgatcctcctgcctcagcctcccaaagtgctgggataagaggtgtgaggcaccatccccggccagtttgcagtctaaaatgtgtgaatgacaactactggtttgggagggacaaaagctgtgaatattgctttgatgaaccactgctgaaaagaacagataaataccgaacatacagcaagaaacactttcggattttcagggaagtgggtcctaaaaactcttacattgcatacatagaagatcacagtggcaatggaacctttgtaaatacagagcttgtagggaaaggaaaacgccgtcctttgaataacaattctgaaattgcactgtcactaagcagaaataaagtttttgtcttttttgatctgactgtagatgatcagtcagtttatcctaaggcattaagagatgaatacatcatgtcaaaaactcttggaagtggtgcctgtggagaggtaaagctggctttcgagaggaaaacatgtaagaaagtagccataaagatcatcagcaaaaggaagtttgctattggttcagcaagagaggcagacccagctctcaatgttgaaacagaaatagaaattttgaaaaagctaaatcatccttgcatcatcaagattaaaaacttttttgatgcagaagattattatattgttttggaattgatggaagggggagagctgtttgacaaagtggtggggaataaacgcctgaaagaagctacctgcaagctctatttttaccagatgctcttggctgtgcagtaccttcatgaaaacggtattatacaccgtgacttaaagccagagaatgttttactgtcatctcaagaagaggactgtcttataaagattactgattttgggcactccaagattttgggagagacctctctcatgagaaccttatgtggaacccccacctacttggcgcctgaagttcttgtttctgttgggactgctgggtataaccgtgctgtggactgctggagtttaggagttattctttttatctgccttagtgggtatccacctttctctgagcataggactcaagtgtcactgaaggatcagatcaccagtggaaaatacaacttcattcctgaagtctgggcagaagtctcagagaaagctctggaccttgtcaagaagttgttggtagtggatccaaaggcacgttttacgacagaagaagccttaagacacccgtggcttcaggatgaagacatgaagagaaagtttcaagatcttctgtctgaggaaaatgaatccacagctctaccccaggttctagcccagccttctactagtcgaaagcggccccgtgaaggggaagccgagggtgccgagaccacaaagcgcccagctgtgtgtgctgctgtgttgtgaactccgtggtttgaacacgaaagaaatgtaccttctttcactctgtcatctttcttttctttgagtctgtttttttatagtttgtattttaattatgggaataattgctttttcacagtcactgatgtacaattaaaaacctgatggaacctggaaaa

SEQ ID NO: 226 - DNA, 1500 bp, Homo sapiens
ggcctcgcccacaatattaagcttttcatgctttactccctaatctcggatcacacttctgcagtcctttcttaaatacatcaacccaactttaaaccttactcaccctattcattcaagtcttccagtctcccaggccctgcccctcaagtaccctttcctcaagttccgcccctcgacttctccttccctttcccgtaggtaccgcccctcaaatctccctcccctctagcctcggcccccctatttcctctaacttcagcgcccgcccctccagtcccgttcgtctcccttctccacacctcaacgttgcttccctcagtccccgcctctcaatttcctcctgagaaatcaagacacttctctcacgcctgctctctagacctccgcccccccatcagtcccgccttctcttccgccagccagatccgtcctcccctctcgcaggccagacctcgacgtgtctctcgcccgggcccgtttcccgaaaccgtcgctcgtaccagtccataaggctgaagtagtctcgagtggggtcaggtgcctgcagcgctcggcactgtgggcagaagaacctgtcctcccgcccggggccccatgggccgccgcagttccaacagcggggataattgcttcccgcctgcgacgcagcatcgcagcttagcggtctccttctgggaacccctgtcggccaaaacccccacacccggagcaaagccccggctctcccccgccacatctggccggcggcctatctagccgtggtcactcgtggggaaaagcaaagagagcgtctaaccagactaatgttgctgattggctggggagtcgagggggcgggatcacccgaggggaacccgggttctaagttccgctctcccttctaaactacaactcccaggaggcattgaggcggcgcctgacggccacatctgctgctcctcattggtccggcggcaggggagggggttttgattggctgagggtggagtttgtatctgcaggtttagcgccactctgctggctgaggctgcggagagtgtgcggctccaggtgggctcacgcggtgagtcatatggggaacttctgttgggtgtttggtggttcgaatcccatcttaagcgttttgtgcgaacggagtctcctgagcttcgctttgtctgtagttttgagctgaagggggagtgtgtgggcgactctcttccttttcagtagatcatcctcgaggtgaagttcacttcccgtattacttgcaagctgaaacaggcctgaacatacaggataagaagaacagcgttgtattcttcaatatcagagcgaagtgacttcgtaaaaattctatagatgttagaaatcgttgccattctttaggttcaatctataaaatacttatagagaagccagtcttagctactgggcgctgcagggactggaaacgcactgagctgtgtaggaggatgttctgcgtgtccctaaataagtccctaagtaaatgtatgg

SEQ ID NO: 227 - DNA, 1066 bp, Homo sapiens
taccagtccataaggctgaagtagtctcgagtggggtcaggtgcctgcagcgctcggcactgtgggcagaagaacctgtcctcccgcccggggccccatgggccgccgcagttccaacagcggggataattgcttcccgcctgcgacgcagcatcgcagcttagcggtctccttctgggaacccctgtcggccaaaacccccacacccggagcaaagccccggctctcccccgccacatctggccggcggcctatctagccgtggtcactcgtggggaaaagcaaagagagcgtctaaccagactaatgttgctgattggctggggagtcgagggggcgggatcacccgaggggaacccgggttctaagttccgctctcccttctaaactacaactcccaggaggcattgaggcggcgcctgacggccacatctgctgctcctcattggtccggcggcaggggagggggttttgattggctgagggtggagtttgtatctgcaggtttagcgccactctgctggctgaggctgcggagagtgtgcggctccaggtgggctcacgcggtgagtcatatggggaacttctgttgggtgtttggtggttcgaatcccatcttaagcgttttgtgcgaacggagtctcctgagcttcgctttgtctgtagttttgagctgaagggggagtgtgtgggcgactctcttccttttcagtagatcatcctcgaggtgaagttcacttcccgtattacttgcaagctgaaacaggcctgaacatacaggataagaagaacagcgttgtattcttcaatatcagagcgaagtgacttcgtaaaaattctatagatgttagaaatcgttgccattctttaggttcaatctataaaatacttatagagaagccagtcttagctactgggcgctgcagggactggaaacgcactgagctgtgtaggaggatgttctgcgtgtccctaaataagtccctaagtaaatgtatgggatagggtggccagaagtgggtaggagggcatcagtcctccttcggacttaggttttctgcttgaa

SEQ ID NO: 228 - DNA, 1325 bp, Homo sapiens
tcactatgttggccaggctggtcttgaactcctgacctcatgatctgcccgtcttgtcctcccaaagtgcgggactacaggagtgaacccccgcgcctggccccctgtatatatgaaatttaaatgtagtgttgattgtatcagtacatttttggtttcagtcttaatttaaaagaattggacaaatgtaagcttttatgagccccccagctcaattttattgctttttacttatttgtaaccttcagataatttgtttttccctgtagtttatggctgtcagataaaaaactgatctggtgacaatgatctggtgaaaagctcagcccagaagaactataggtctgggctgttaggacttttaatttttggagagcatgtttgccctgtttttttttttttcttttcttttgctgttgtaataggcccatcatttactttttaattttaagtcttgtgccttgaaactcacctttgttgttggacactttctttttgaggtcgtgatgtctcgggagtcggatgttgaggctcagcagtctcatggcagcagtgcctgttcacagccccatggcagcgttacccagtcccaaggctcctcctcacagtcccagggcatatccagctcctctaccagcacgatgccaaactccagccagtcctctcactccagctctgggacactgagctccttagagacagtgtccactcaggaactctattctattcctgaggaccaagaacctgaggaccaagaacctgaggagcctacccctgccccctgggctcgattatgggcccttcaggatggatttgccaatcttggtaagaccctttgttgtatagtatcacgttttgttcagaaaaacacttacagaaagttgtattaccaggtggaaggttctgattggagttgtccaggtttttggcacgttgaacaaataattgaacatcatgcatgaacaagcaatgaaagcatagatttattgaagtggaaggcaatagaagctaaagtacatgtcacaggatgggagcaggcctgagcaagtggctgcagagcccttgtagcaaagtcttctggggttcaagtaccctctagaggtctcccactgtttacatcctatgtaaatgaagtgctggctcacagcccattagaggccaaagtgaattggagctcggccattccaagactggtgtggattgacgccttatgcaaatgaaggtcctagaatggacggatcataggccagagtgcaaattcttccttttttgtttagtttcaggaatttttttttttttttttttggcaacggagtcttgctctg

SEQ ID NO: 229 - DNA, 1129 bp, Homo sapiens
tgtattcttggtggagatggggtttcatcatgttgcagtctggtctcaaactcctgagctcaagcaatacatccatcttggcttcccaaagtgttaggattacaggcataagccacagtgcctggcctagttttagctcttatgtttaattaaggtcctttattcattttaagttttatttatttatttattgagacggagccttgctctgtcaccaggctggattgcaatgtcatgatctcggctcaccgcaacctcctcctcccggtttcaagcgattctcctgcctcagcctcccaagtagctgggattacatgcttatgccaccatgcctggctaatttttgtatttttagtagagatggggtttcaccatgttggccaggctggtctcgaactcctgccctcgggtgatccacccgcctcggcctcccaaagtgctgggattacaggcatgagccaccgtggctggcctaacttttttatttttattttttgtagagacagagtctggccatgttacccaatctgatcttgaactcctgctgtcatctgatcctcctgcctcagcctcccaaagtgctgggataagaggtgtgaggcaccatccccggccagtttgcagtctaagtatgatgttagctgtgggtctttccctttccctttctctttcccttttccttttcctttcccctttcccctttcttttttcctttcctttcctttcccttctgctttcctttcccttccgctttcctttcctttcccttccgctttcctttcctcccctcccctcctctcctctcctcttttctttcctcttctctctcctcttctctcttcctctctcctttctcctctgatatctgaagactaagctgtggatgtttcataaaagttctttctggggtgggtgcagtggctcatgcctgtaatccaagcactttgggaggctgaggtgggcggatcacaaggtcaggagatcgagaccatcctggccaacatggtgaaaccccgtctctactaaaaatacaaaaacaaaattagccgggcgtggtggcaggagcctgtatttccagctagttggtgatagagtgagactctgactcaaaagaaaaaaaaaatgcttt

SEQ ID NO: 230 - DNA, 1125 bp, Homo sapiens
gcgcagtctcagctcactgcagcctcgacctcctgggctcaagcgatcctcccacctcagcctcctgagtagctgagaccacagggacccaccaccacaccctgctgattttttattttttgtagagatagggtttcaccatgttgcccagactaatttttaaattcttggtagagatgggtgccccctatgttgcccaggctggtcatgagctcctggggtcaagtgatcctcctgccttagccttccaaagggctgagattacaggtgtgagccactgtgcctggccatgtggttatagataaactgccatttgttaaactcattggtaatgttgttttttctctcctaatttttaatcttgtaaaatcttgataagcagattgataattctgattgccttcttaggctattttcctacaattagcatttatgagcaatttttaaacgtttgatacatgaaattcaacagccctctgatgcatgcttttatattacagaatgtgtgaatgacaactactggtttgggagggacaaaagctgtgaatattgctttgatgaaccactgctgaaaagaacagataaataccgaacatacagcaagaaacactttcggattttcagggtaggtaatgaatacccatgtatctaggagagctggtaatttggtcattgtttttagatattttcccactataaatctctgctattcaaagtctgaaacaaaatgttctctattttaggaagtgggtcctaaaaactcttacattgcatacatagaagatcacagtggcaatggaacctttgtaaatacagagcttgtagggaaaggaaaacgccgtcctttgaataacaattctgaaattgcactgtcactaagcagaaataaaggtaatattattatcttatggttactggaattttttttttccactctctcataggaggaaaatttgtcctgtccttacagaatatggtttaagtgagtaaagatgagtaagttgctgggcgtggtggctcacacctgtaatcccagcactttgggaggctgaggcggatggatcacctgaggtcaggagttcgagaccagcctgacccacatggagaaaccctgtctctactaaa

SEQ ID NO: 231 - DNA, 1148 bp, Homo sapiens
ccttccaaagggctgagattacaggtgtgagccactgtgcctggccatgtggttatagataaactgccatttgttaaactcattggtaatgttgttttttctctcctaatttttaatcttgtaaaatcttgataagcagattgataattctgattgccttcttaggctattttcctacaattagcatttatgagcaatttttaaacgtttgatacatgaaattcaacagccctctgatgcatgcttttatattacagaatgtgtgaatgacaactactggtttgggagggacaaaagctgtgaatattgctttgatgaaccactgctgaaaagaacagataaataccgaacatacagcaagaaacactttcggattttcagggtaggtaatgaatacccatgtatctaggagagctggtaatttggtcattgtttttagatattttcccactataaatctctgctattcaaagtctgaaacaaaatgttctctattttaggaagtgggtcctaaaaactcttacattgcatacatagaagatcacagtggcaatggaacctttgtaaatacagagcttgtagggaaaggaaaacgccgtcctttgaataacaattctgaaattgcactgtcactaagcagaaataaaggtaatattattatcttatggttactggaattttttttttccactctctcataggaggaaaatttgtcctgtccttacagaatatggtttaagtgagtaaagatgagtaagttgctgggcgtggtggctcacacctgtaatcccagcactttgggaggctgaggcggatggatcacctgaggtcaggagttcgagaccagcctgacccacatggagaaaccctgtctctactaaaaatacaaaataagccgggcatggtggtgcatgcctgtaatcccagctattcgggaggctgaggcaggagaatcgcttgaacccgggaggcagaggttgcagtgagccaagatcgtgccattgcactctagcctgggcaacaagagtgaaactctgtctcaaaacaaaaaaaaagatgagtaagttagcactcaagattcaactttgccgtcctagttgcattgtaaaattatgaaaaagttccatccagacagatttttaaggttt

SEQ ID NO: 232 - DNA, 1091 bp, Homo sapiens
aatacttaataccggatatataaaggtataaatggctgagagatgataatacccgtatggtgatactgatggcctaattttcattgggatatttacttgcctagaccattttttctaggctcagactgatggattgctttttgattctgggcctgttgtaaatctgcatgggcattttatattagtgtaattgattgatattctgaggtcaaggaatataaataatgttgtgttacggattttttgcactagtttcagagtgatgcttatagttccattgaagcatgaaatttgactatcatttatttctcaagggctttacaatatgtattagcccactaatacctattatattacatacatactaatttccttaaggttacatgttaaatgtagttaaaaacagttcttatattccatatgatgaataaattttagaatcagtgatcgcctcttgtgaataaattaatgaaacccatttctactcttttcttccttagtttttgtcttttttgatctgactgtagatgatcagtcagtttatcctaaggcattaagagatgaatacatcatgtcaaaaactcttggaaggtaaattattttcttatataaatgcacttaattttttcactatacatttgtgattggtggtttctcatttctgattttataacactcattatgtattgataacatttgtatggtatctatttgtgtattattttttatttttatttttgtgtgttatttcacacagtcattttaatttatttttattttatttctttgtgagacagggtgttgctctgttacccaggctggagggtagtggcacgatcagagctcactgtggccttgatctcccaggtcaagggagatcaggcatgcagcaccatgcacaactaatgtgtgtttttgttttttagagttggggttgcgctgtgttgccagggctggtcttgaactcctgggctcaacccatcctcctgccttagcctcccaaagtgctgagattagtagcgtgagccaccatgcccagccaaatatttctttttttatttcctgtgtgtgtgtgtgtgtgtgtgtgtgtg

SEQ ID NO: 233 - DNA, 1109 bp, Homo sapiens
atttgatttagggtgcaacttatgtcatcaactgcttatgcacttcctttgaagatggagaataagaaggaaagaaatttatccattaaagttattcatttgcagattctgtttaccgttatttgtttgttttgggcacttatttttgaccagggaggactgtttctagttaatgtttttctgacctctcggatacgtagtttctctctcatttttctcttagtatctttctgggaatttcacaatccagggctacagtaagacccatgtttgtattgctgggctcagaaatggaatttggagctgacttagtgtttttggctgttaagcccttgacattttacactggtgaagtttcactgtgtcctctgcaaacagggacaatggaaaggctgttatatggaatgtctgtaaattctaatacttgaagtggacccaggagtggtaggtctcataattaaaaacattcagacaatcactatctttgtttttccctctagtggtgcctgtggagaggtaaagctggctttcgagaggaaaacatgtaagaaagtagccataaagatcatcagcaaaaggaagtttgctattggttcagcaagagaggcagtaagtaccaataaaaggctgatcaccttttattaacacgtcttcataacttcccaaaataatcttagattgatgatttttaaactcaggaataaccccctgcttagatggatgaatttgtgagtatcaaagaacatggaaaattttggggcatctttgattaatctagaaacttttacttatagataatttggttccaaaagtatttaattgtacataataatgagcatagtgggaagtttttttttttcttcttccaagttcaaagtcgttacaagattgtttttacaataaatgacaggaaattagagaaaaaaattcagccataatccccactgtaaccccacagctgttttcagttttccttttccttctagattttgttcagatgaaatcgtgtttttagatggttgaaatcatcttgtatatacagttttgtattttgcttttccacaaatgcattatagcatagacttttgcctaatacatcctttttgatg

SEQ ID NO: 234 - DNA, 1054 bp, Homo sapiens
ctctattagcagaaatttgacttcacattttctttatatagtttaattgaacaccttcttgttcatgttttttgtttatcattttaatgaataaaaatagttccatagctaataagtagggtttactaattaaaatgaacacagtggaaacacacttgtttctgactgtggagactagggcaagtggcttctgttttctgagccttggttgccccatctgtaagatggggattctgaggcttatgagacatgatctctgtaaataaagagcttggcacagggcctggccatttattgagtgcttactatttgccaagcattttacaaagttattttaggtgaggtatttaagtcattgacctgggctttgatttctttgtataagtagagctgggtttggaactcaggcagccttgagtcaactgagtttaactgtaaatgtttttttaaatattggcaattattattactaataaactctgttattctgtttatcaaaggacccagctctcaatgttgaaacagaaatagaaattttgaaaaagctaaatcatgtaagtattattatatgactcatacttagatttatctatctcaaaatatgagaagagtataaagcctttcagtataataaagataatattggccaggtgtggtggctgatgcctgtaaccctagcactttgggaggccgaggtgggtgaatcacctgaggtcaggagtttgagaccagcctggccaacatggtgaaaccctgtctactaaaaatacaaaaatttagctgggcatggtggcacatgcctgtaatcccaactacttgggaggctgaggcaggagaagtgcttgaacctgggaggcagagattgcagtgagccaagatcgcgccactgcactccagcctgggcgacagagtgagactgtctcagaaaaaaaaacaagaaaaattaaaagaataaataaagctaatattaacctgggttctttaacttatgtgtacattcacacacatgcctagctgtcatttagctgggaagagttttaccccaaaatgttac

SEQ ID NO: 235 - DNA, 1062 bp, Homo sapiens
ttagaattttcctcttcctttgaaaaatggtaggatcttgttccatggggtccaattgcctggaggttccagttgcccagagcttaaataacccttgtttggcagcatggctgggctcctacttgacagcttttattcatgctacttgtcagtctccctcagggttccttaggctgtccttgagtacctctgctctggggtagtgaggaagaagactgggaagagacctagccttcattcccaggtagcatccttgcatatgaaatatgaactagtctctcaccatcatggtggggtggaaaatttcttgcatgttctcactgaggagttggctagattctgtctgccttctcccctgattgaacttccaagcctctgaggcagggggccagatgcctgttcttggcctccctgtccctctgggcagatgttctaagctcttgtggttttcctcttgggagtttctcactactttcccttttttctccccctcttcttagccttgcatcatcaagattaaaaacttttttgatgcagaagattattatattgttttggaattgtaagtagtaaactttttaaaaatttctgtttccattcaaatgctttataaagccaccaaagaatctaatgtaggcttgcctttctcatcctggggggcctcaacgtatgtatgtagtagtggggcccacaaagtctgtgtatagggggttaatatcaacccaaaaaaccctccaatgtttccaaaaataggtggtatgggattccaggtcctggatctatgatcaggacttgaactccactctgcagttgactagctgaccacccatgggtcagtttaactcacttttctgagtctcatcttcatagtgttaaatggggattataatgaacccccacatgcagagtccttgtatgaattaaatgctatgagggatggaaatcccccagcagagcacctggcacatgtgtgtactcaccatggggcaatattgttataattggctcaccataactgtgggtttttacatccgtgtattcaaccaacctcagatcgaaaat

SEQ ID NO: 236 - DNA, 1100 bp, Homo sapiens
tttgagaccaacctggccaacatggcaaaaccttgtctctactaaaaaaaatacaacaattagccgggcatggtggtgcatacctgtaatcccagctacttgggaggctaaggcatgagaatcacttgaacctgggaagcggaggttgcagtgagccaagatcgcaccactgcactccaacctgggtgacagagcgaggctctgtctcaaaaaaaaaaaaaaaaaagcaactcctgggccccacttccaagctactgaattggattttttaaagttccccaggtgcctccaatgcccaatcctttcatctcattccttagtttccaactgggacatctgattgtgaataaaccttattagttttaaaaatgagagtcaaaagtgaataaaaatgtcaactgtttgcttgtcttaatgaatttgttttgttgttttattgtcttctgtccaagtgcgttttcccccaggaatgaaccccttgccttgcctttgtgtttcaggatggaagggggagagctgtttgacaaagtggtggggaataaacgcctgaaagaagctacctgcaagctctatttttaccagatgctcttggctgtgcaggtaaaagaagccctcaattcttttgacagctgcctttcttttagttgaattactccctgaattaggcagaaatcgagggaccgtggattaaaactcagaagagaatctgtgtgtttgctgttctcttcttggcaaaaatgtcctactcctttcactgagatgaaaaagctctcactggcgaggcgcggtggttcatgcccataatcccagcattttgggaggccaagcgggcggatcacgaggtcaagagatcaaaaccatcctgaccaacatagtgaaaccccatctctactaaaaatacaaaaattagctgggtgtagtgttgcgtgcctgtagtcccagctactcgggaggctgaggcaggagaatcacttgaactgggaggtggaggttgcagtgtgctgagatcatgccactgtgctccagcctggggacagagtgagactccatctcaaaaaaaaaaaaaaaaaaaaaagaaaaagctctcactgtgtagctta

SEQ ID NO: 237 - DNA, 1087 bp, Homo sapiens
gacaaagtctttgcattgaggaataggttaactcacataaacagatatatatttgtatcacataaatagatatttacaaatatatatttgtataggttccctttaaaaatattctcaggactgcaataaccaaatatatcattttggtggaatttttgtgtttatttggtatgttctcaaaacattttctgttacccatttgaatttttattgaaattgacaccttacatttctgctgtgtgaagagttgtttattatcttaaagtgaaatgaaaggttaattgttctaagttgcttttttcatttccctgctttttaaagatcttctcaaacaaatttgtaaactttaccccaacagttttctatgattttggagaatatggttgtgtgtatcacggcttacggtttcacccagctgtgagatgtgtgtgttggtaactttgattctacttaagtatctactgcatgaatctgagggtcatgcctgcctttctgtgtagtaccttcatgaaaacggtattatacaccgtgacttaaagccagagaatgttttactgtcatctcaagaagaggactgtcttataaaggtaagaaattggcattctgtatgtggctattcctgtagattcttgttcagaaacttttaattcctcaaataaaaagtgggagcgtaaaaaggatgagaatctgaccctttcactgttaccaattattttagagatcaggtgatactgctcttatccagattcgaatgagcatttattgagctctgttgtgtacaagtgacctttgtgcttagagagagaggaggggtctaaatggacgagtgggctgggtatggtggctcacacctgtaatcccagcactttgggaggccgaggtgggcagatcacctgaggtcaggagtttgagaccaacctggccaacatggcaaaaaatacaaaaatttagctgggcatggtggtgggtgtctgtaatcccagctacttgggaggctgagacacgagaatcacttgaacctgggaggcagaagttgcagtgagctgagatcgcaccactgcactccagcctgtgcaaaagggccaga

SEQ ID NO: 238 - DNA, 1164 bp, Homo sapiens
aatgagtaatcacatgcgctgcctttccctgtttctcaagtctggcatcactttagaatctcttgttaggatttatgacacccaggctttacctcagaagctgagagtggcactcaggtataagcatgtgtttccaagctccccaggtattccatagcgcagccaagtttgagacactggggtctaagaaccatgtagaactaattagaatcctgaagtgtctgtgataaagataataagctttttgtaagattacagaggacataggttaagttggaaagcctgagtgttgagattcctaggctcaggaattttaatttaagcaaaattaaatgtcctaacttgcaaagacatgaatctgtaaattccagattaatggcaggtgtgaattgtacaatagaaactgatctagcctacgtgtcttcttggactggcagactatgttaatctttttattttatggcaagttcaacattattcccttttgtactgaattttagattactgattttgggcactccaagattttgggagagacctctctcatgagaaccttatgtggaacccccacctacttggcgcctgaagttcttgtttctgttgggactgctgggtataaccgtgctgtggactgctggagtttaggagttattctttttatctggtaagaaatattttcattgctgcacagactggtaggaggtgattagatgaagtcacaaatgtgtcttgctctgttgtccaggctggcatgcagtggcttgatcttggctaactgtagcctctgcctcctgggtcaagtgatcctcccacctcagcctcccgagtagctgggactacagatgcacaccaccatgcccagctaatttttctattttttgtagtgatggggttttgccatgttgcccaggctggtctcgaactcctgggctcaagtgatcctcctgcctcggcctcccaaagtgctgggattacaagcctaaggcattgtgcccagcctagctcactttttgaccattgatttaaagaaaaatctgacttttcattatgctgaaaaagaaatctttatatctgaatgccactgagaatgccacttgatttcttttcctttctctctctaccaatattaagccttagtgggtatccacctttctctgagcatag

SEQ ID NO: 239 - DNA, 1116 bp, Homo sapiens
ctgctggagtttaggagttattctttttatctggtaagaaatattttcattgctgcacagactggtaggaggtgattagatgaagtcacaaatgtgtcttgctctgttgtccaggctggcatgcagtggcttgatcttggctaactgtagcctctgcctcctgggtcaagtgatcctcccacctcagcctcccgagtagctgggactacagatgcacaccaccatgcccagctaatttttctattttttgtagtgatggggttttgccatgttgcccaggctggtctcgaactcctgggctcaagtgatcctcctgcctcggcctcccaaagtgctgggattacaagcctaaggcattgtgcccagcctagctcactttttgaccattgatttaaagaaaaatctgacttttcattatgctgaaaaagaaatctttatatctgaatgccactgagaatgccacttgatttcttttcctttctctctctaccaatattaagccttagtgggtatccacctttctctgagcataggactcaagtgtcactgaaggatcagatcaccagtggaaaatacaacttcattcctgaagtctgggcagaagtctcagagaaaggtatgaatatgaaagggttaagaatttgtggtatgctaaaatgtgtatgtgctgtggtgggagtttcttcccaaattccatggtgttttctcctgtcaattctgttcttattttctattgttagtttcacaccatttgagaggcactggaaattattaagagcatgcactcaggtcctgggtctgctactacttagctgtgtggccttaggcaagttatttaacctccatctccaatttctttctgtgtaaagggaccctcaataaaccctaccttaaaaggtttttgtgagggttaagtatcatgtacacaagtgcctggtacctattttagtgagcaaaataaatgcacttgtaactttttagttacaaggtttcctttgagtaagcaagcatgtaaaaactagatgtcattagttaccttgtattttataatttatcctggcaactttagttccctgaagagaaagtagaaaattaaatgtcaaataacataacata

SEQ ID NO: 240 - DNA, 1086 bp, Homo sapiens
gttaaatgtcagaatatttaaggaataataatgttgtaatatacaggccagcgtgcatttgttgcttgctggagtagccaagttttatttctgacaagtctgcagttccagggagcctctccctcgctgagtaactgtcacctatccatctgtagatgtcagagagagtttgctgtgcatcccaagtatcttagaattgggtagaagtttagctttaattagtccgaccttgagtctagcaacaagagagggaacaggcagtgaagaggtcgtgactgacgtcccagcagcaggagacagggagtgtcattatcattcctggtcttctcacagtactctgaatacagagagtgaggaagattagggggccctgtctgctgactccgtgatgatctcagaccctctctgctctttctgaatggtggcctgttaattctggcatactcttactgataatatatttatccttttcactgtgatttgcccaattgttgctttagctctggaccttgtcaagaagttgttggtagtggatccaaaggcacgttttacgacagaagaagccttaagacacccgtggcttcaggtgggtgtgggacagtgcctgctagcataaaatacatgggaagccctgctgcctgagagacatgagacagaggacagaaacatgtttactttgttgagtgtttaatctaattgttttagatgtatggggggtatcttggaggatgggttacaacctgttttatttttttttttgagacaggttcttgttctgtcaccctggctggagtgcagtggcacgatctcagctcactgcaacctctggcccccgggttcaagtgattctcctgcctcagcctcccaagtagctgggattacaggtgcatgctgccatgcccagctactttttgtattttttgtagagatggggtttcgccgtgctggccaggctacaacctttttgatattactcatggctgttggatgtacacgctcactttatgtcctgttctggttccacttggctgccccgagtctcctgtttggcctgtgttcttttgagtgcttgttctggctctaccc

SEQ ID NO: 241 - DNA, 1081 bp, Homo sapiens
gtgggcttaagtacttctgaaaatttgtatggcatctgctgggtgaattttcctagggtgctgggctggttgttaggacagtctgggtgactggcctcattcatggcaggggcagcaggtggagagtggtccgggaaggatttgaggagctgcacggagtcaggcccagcctctggcctcctgattgccacctttctcaggatcttggatactaattaagaaactcttgactgctggaggctgtgattgacccactgagagcttttaggcatgtggatgtgagtcagccaggattgatggagcattgactgctaattagactcctctgggaaggtagaggcgggcaacacataatgccttcgctgtgggagcttcatcaaggggatgattcttggacggacatttttcctccctctttccacaggggcatgctagccctgtcattctaggagtttattatccttcagacacagctacttatgtttttaattccctcacaggatgaagacatgaagagaaagtttcaagatcttctgtctgaggaaaatgaatccacagctctaccccaggttctagcccaggtattcgtattcctgatgatcactaaatgtagtctgggcttaaggagctgataagcaaagatgatgaaattcaagattttcctgagtagcaattgcttaacattgtttcagttataatgtagtagaaactctgttttaacttgattcgctccagcacccttagatttaaaaatgcaggatatgtttaatatctaacacataatagaccgataagcacagctagggattgtcatccaaaaggtcacctgcaaggcaatttcgaaagactctattagaggctcaaatataaatttgttgaacaaattaaaatttgggtcagtagttgattccttgattacaattttattctttaaagttctttgtgagtataagttaattccagtcctgcttttttgttgttgttgttgttgttgaatggtagctgtcctttttcccactgtttcctccccccaattttttttttcttgagacagagtcttggtttgtcactcaggccggag

SEQ ID NO: 242 - DNA, 1244 bp, Homo sapiens
atgttggtcaggcttgtctcgaacttttgacctgaagcgacctgcccacctcggctttccaaagtgctgggattacagctgtgagtcaccgcacccagccttcctcccaattttatatatgggaaaacaactaaggcacaaaggttgtcttcccgcaaaagaccaagacttggggcttcaactgagaggtattatagtccttttaaacttgatatttagaagaggacgatcaagaggaagttggttatgctacttgctttcagtatacatcgttcagaggtcagaagccataagggagagaaatatctattagataagcatgtctgagttgggggctgtggtgaggactcagttgtcaatgatgacaaccagtaatttttggttctagaatttcacatcaaatgcccccactttactggaagcatattgaggaactttgataatcttaaagaagccagtgattttcttttgaacatttctccattttcctttattttcagccttctactagtcgaaagcggccccgtgaaggggaagccgagggtgccgagaccacaaagcgcccagctgtgtgtgctgctgtgttgtgaactccgtggtttgaacacgaaagaaatgtaccttctttcactctgtcatctttcttttctttgagtctgtttttttatagtttgtattttaattatgggaataattgctttttcacagtcactgatgtacaattaaaaacctgatggaacctgggctttgtgcttctgcttgataatcggttctttagttgaatggctttattatttatttatttgagatggagtctcactctgttgcccagcctgaatgaagtgcagtggtgcaggcttggctcactgcaacctctgcttcccaggttcaagcgattcttgtgcctcagcctcctgagtagctgggattacaggtatgcaccaccatgcctgttaatttttatatattttgtagagacagggttttgccatgttggccagcctggtcttgaacttctgacctcaggtgatctgtctgcctcagtctcttaaagtgctgggattacacgcatgagccactgagcctagcctgaatggcttttttatatttaaagttgtgtgcctttcatctggagctacaccttggctatcactaggcaggtttcccaggatgtcaccctggtctcagcctgtgagagctgaatacaaattctaagggccccttggaaagttccagggaaggga

SEQ ID NO: 243 - DNA, 1500 bp, Homo sapiens
ttatgctacttgctttcagtatacatcgttcagaggtcagaagccataagggagagaaatatctattagataagcatgtctgagttgggggctgtggtgaggactcagttgtcaatgatgacaaccagtaatttttggttctagaatttcacatcaaatgcccccactttactggaagcatattgaggaactttgataatcttaaagaagccagtgattttcttttgaacatttctccattttcctttattttcagccttctactagtcgaaagcggccccgtgaaggggaagccgagggtgccgagaccacaaagcgcccagctgtgtgtgctgctgtgttgtgaactccgtggtttgaacacgaaagaaatgtaccttctttcactctgtcatctttcttttctttgagtctgtttttttatagtttgtattttaattatgggaataattgctttttcacagtcactgatgtacaattaaaaacctgatggaacctgggctttgtgcttctgcttgataatcggttctttagttgaatggctttattatttatttatttgagatggagtctcactctgttgcccagcctgaatgaagtgcagtggtgcaggcttggctcactgcaacctctgcttcccaggttcaagcgattcttgtgcctcagcctcctgagtagctgggattacaggtatgcaccaccatgcctgttaatttttatatattttgtagagacagggttttgccatgttggccagcctggtcttgaacttctgacctcaggtgatctgtctgcctcagtctcttaaagtgctgggattacacgcatgagccactgagcctagcctgaatggcttttttatatttaaagttgtgtgcctttcatctggagctacaccttggctatcactaggcaggtttcccaggatgtcaccctggtctcagcctgtgagagctgaatacaaattctaagggccccttggaaagttccagggaagggagcatagcgaggttgggggtggagtttgtagagactggctggctggctgcagacatcttcatgagaacagcaggtaccttggtgcatgataacaggccaggttatattctcatcctcgccctcataaagatacaggtctaccgtctctgaaacctttgggctagataagttgtgaaatttaattatccaattttaggaaggtggtaaggcatatctactatgtgtatgtgtagcaccccagtggagtcctacacatgtggagtcctaccccagtggagaccaaacatgttaatatttccacagcaaatattcacagtaagagggatagagaaagattataggtagttgcatattggttcatatcagtcttttcttccaaatgagctacaatgacttgtttttgagagctgtttgggttttggaagtggagataaggcatgtggttatgtcttgttgacccaataatgaccagggaggccctgtgcaaagacttacccttgg

SEQ ID NO: 244 - DNA, 1731 bp, Homo sapiens
aactgcagcgccggggctgggggaggggagcctactcactcccccaactcccgggcggtgactcatcaacgagcaccagcggccagaggtgagcagtcccgggaaggggccgagaggcggggccgccaggtcgggcaggtgtgcgctccgccccgccgcgcgcacagagcgctagtccttcggcgagcgagcaccttcgacgcggtccggggaccccctcgtcgctgtcctcccgacgcggacccgcgtgccccaggcctcgcgctgcccggccggctcctcgtgtcccactcccggcgcacgccctcccgcgagtcccgggcccctcccgcgcccctcttctcggcgcgcgcgcagcatggcgcccccgcaggtcctcgcgttcgggcttctgcttgccgcggcgacggcgacttttgccgcagctcaggaagaatgtgtctgtgaaaactacaagctggccgtaaactgctttgtgaataataatcgtcaatgccagtgtacttcagttggtgcacaaaatactgtcatttgctcaaagctggctgccaaatgtttggtgatgaaggcagaaatgaatggctcaaaacttgggagaagagcaaaacctgaaggggccctccagaacaatgatgggctttatgatcctgactgcgatgagagcgggctctttaaggccaagcagtgcaacggcacctccatgtgctggtgtgtgaacactgctggggtcagaagaacagacaaggacactgaaataacctgctctgagcgagtgagaacctactggatcatcattgaactaaaacacaaagcaagagaaaaaccttatgatagtaaaagtttgcggactgcacttcagaaggagatcacaacgcgttatcaactggatccaaaatttatcacgagtattttgtatgagaataatgttatcactattgatctggttcaaaattcttctcaaaaaactcagaatgatgtggacatagctgatgtggcttattattttgaaaaagatgttaaaggtgaatccttgtttcattctaagaaaatggacctgacagtaaatggggaacaactggatctggatcctggtcaaactttaatttattatgttgatgaaaaagcacctgaattctcaatgcagggtctaaaagctggtgttattgctgttattgtggttgtggtgatagcagttgttgctggaattgttgtgctggttatttccagaaagaagagaatggcaaagtatgagaaggctgagataaaggagatgggtgagatgcatagggaactcaatgcataactatataatttgaagattatagaagaagggaaatagcaaatggacacaaattacaaatgtgtgtgcgtgggacgaagacatctttgaaggtcatgagtttgttagtttaacatcatatatttgtaatagtgaaacctgtactcaaaatataagcagcttgaaactggctttaccaatcttgaaatttgaccacaagtgtcttatatatgcagatctaatgtaaaatccagaacttggactccatcgttaaaattatttatgtgtaacattcaaatgtgtgcattaaatatgcttccacagtaaaatctgaaaaactgatttgtgattgaaagctgcctttctatttacttgagtcttgtacatacatacttttttatgagctatgaaataaaacattttaaactgaatttcttaaaaaaaaaaaaaaa

SEQ ID NO: 245 - DNA, 1500 bp, Homo sapiens
atattacagctaacaaaaaataacatttaaaaacactaaatagtatatatatgaagtatttataattattttaatattgtaataatatagtgtgttgtgatttgaattcatctgcacggaaatcgattactgtcctttctttctatttccctatattttctttccgaaggcgtcatcaacattttggttctttaatagtaaccaaaacccgaaatcatctcggttctcagtatttggctctatgggaacaccttttcttttctctctttttttttttttttgagacggagtcttgctcctgtcgcccaggctggagtgtaatggcacgatctctgctcactgcaacctcagcctccccagtagctgggattacaggcatgcgccaccacgcccggctaattttgtatcttttagtagagacggcgttcctccatgttggtcaggctggtctcgaacttcaaacctcaggtgatccgcccgcctcggcctcccaaagtgctaggattacaggcgtgagccaccgcgctcagcctgggaacaccttttcttacatcttcaagtgctagaaatgcttatgaaaacgaaaaaagaattattaagagtaattataaagaaacactcattttcttcccaagagagccaagatttcttctttcctcttctttcttttttttttctttctaatttcaaaggagtataattaaattgccaggtaaaagctcaaaggtcttttttatagtgttctggaaggttctctgcctgtgtttgtatttcctttagcctccacgttcctctatccagttcccgcacccttccccccaggccccattcttcaaggcttcagagcagcgctcctccggttaaaaggaagtctcagcacagaatcttcaaacctcctcggaggccaccaaagatccctaacgccgccatggagacgaagcacctggggcggggcggagcggggcgcgcgggcccacacctgtggagagggccgcgccccaactgcagcgccggggctgggggaggggagcctactcactcccccaactcccgggcggtgactcatcaacgagcaccagcggccagaggtgagcagtcccgggaaggggccgagaggcggggccgccaggtcgggcaggtgtgcgctccgccccgccgcgcgcacagagcgctagtccttcggcgagcgagcaccttcgacgcggtccggggaccccctcgtcgctgtcctcccgacgcggacccgcgtgccccaggcctcgcgctgcccggccggctcctcgtgtcccactcccggcgcacgccctcccgcgagtcccgggcccctcccgcgcccctcttctcggcgcgcgcgcagcatggcgcccccgcaggtcctcgcgttcgggcttctgcttgccgcggcgacggcgacttttgccgcagctcaggaaggtgaggcgcggattggagcagagttgtggagctgggctgggctggggggcagcggcccccggccct

SEQ ID NO: 246 - DNA, 1434 bp, Homo sapiens
aggattacaggcgtgagccaccgcgctcagcctgggaacaccttttcttacatcttcaagtgctagaaatgcttatgaaaacgaaaaaagaattattaagagtaattataaagaaacactcattttcttcccaagagagccaagatttcttctttcctcttctttcttttttttttctttctaatttcaaaggagtataattaaattgccaggtaaaagctcaaaggtcttttttatagtgttctggaaggttctctgcctgtgtttgtatttcctttagcctccacgttcctctatccagttcccgcacccttccccccaggccccattcttcaaggcttcagagcagcgctcctccggttaaaaggaagtctcagcacagaatcttcaaacctcctcggaggccaccaaagatccctaacgccgccatggagacgaagcacctggggcggggcggagcggggcgcgcgggcccacacctgtggagagggccgcgccccaactgcagcgccggggctgggggaggggagcctactcactcccccaactcccgggcggtgactcatcaacgagcaccagcggccagaggtgagcagtcccgggaaggggccgagaggcggggccgccaggtcgggcaggtgtgcgctccgccccgccgcgcgcacagagcgctagtccttcggcgagcgagcaccttcgacgcggtccggggaccccctcgtcgctgtcctcccgacgcggacccgcgtgccccaggcctcgcgctgcccggccggctcctcgtgtcccactcccggcgcacgccctcccgcgagtcccgggcccctcccgcgcccctcttctcggcgcgcgcgcagcatggcgcccccgcaggtcctcgcgttcgggcttctgcttgccgcggcgacggcgacttttgccgcagctcaggaaggtgaggcgcggattggagcagagttgtggagctgggctgggctggggggcagcggcccccggccctcggcccccgaaacgggcataatagggaggggaccaagaggccgcgctttccagcgtggagaccggacggtgcggccgtgctccggctcaggccctccgcgcggtaggaaacggcgagggccgtcccggggagcagcctcacttcgcagctttgctcgccttggtagggaaatggccttgggcggaggcgggggacaggcagggaacggagtggccacgtccaggtttcctgcggccaccgaaccggtgcctcgcgccctggcgcacccacgtcctcggttcggggtggacttggggttccaaaacagccccagccggtggcggagtctttacgacagggaccagcgggctcgcccttgtccttgcagcgggccccggatgtgggcctcaggcggggacaggcgcccgcagggaggcctccagggccgctatgca

SEQ ID NO: 247 - DNA, 1108 bp, Homo sapiens
tgggaggctgaggcaggaggattgcttgaggccaggagttcaaaaccagcctgggcaacatggcgaaaccccgtatctacaaaaagttaaaaattagccaggcatggtggtgcatggctgtagtcccagctacttgggaggctgagacaggaggatcacttgagccctgtaggtccatgctgcagtaaaccaagattgtgccactgcattccagcctgggccacagagtgagaccctatctttaaaaaaaaaaaaaaaaaaaaaaaaaaaaaacaggaatgcatgcagattaaactatgtgtctgtatacagtatgcaaactttagcaagtgccaggcacttaggcagtagtctatagctgaaaaataaaacattcagaaccactttttaaggttttgtgtccttgtaactttaggcattattattacaatataacttagctgggacatgagagttaatagatccacattttaaagtagattttttttttaattttctagaatgtgtctgtgaaaactacaagctggccgtaaactgctttgtgaataataatcgtcaatgccagtgtacttcagttggtgcacaaaatactgtcatttgctcaaagcgtgagtaaaatatcctaattacctgtaagctttattttgacttaatacttctttaattgatgtgccttgagttggaaagagttttattggcttaaatctgaatcatgttacaaagtaagtgtgggaacacataaatttcaaataatctttgaccctggaactttagagttaattttttttttcccgtaatcatgaaatcagttatttttcagtttggcattaaggtttctttttcagtggctgccaaatgtttggtgatgaaggcagaaatgaatggctcaaaacttgggagaagagcaaaacctgaaggggccctccagaacaatgatgggctttatgatcctgactgcgatgagagcgggctctttaaggccaagcagtgcaacggcacctccatgtgctggtgtgtgaacactgctggggtcagaagaacagacaaggacactgaaataacctgctctgagcgagtgagaacctagtgagtggggctgcctatacta

SEQ ID NO: 248 - DNA, 1241 bp, Homo sapiens
cagtagtctatagctgaaaaataaaacattcagaaccactttttaaggttttgtgtccttgtaactttaggcattattattacaatataacttagctgggacatgagagttaatagatccacattttaaagtagattttttttttaattttctagaatgtgtctgtgaaaactacaagctggccgtaaactgctttgtgaataataatcgtcaatgccagtgtacttcagttggtgcacaaaatactgtcatttgctcaaagcgtgagtaaaatatcctaattacctgtaagctttattttgacttaatacttctttaattgatgtgccttgagttggaaagagttttattggcttaaatctgaatcatgttacaaagtaagtgtgggaacacataaatttcaaataatctttgaccctggaactttagagttaattttttttttcccgtaatcatgaaatcagttatttttcagtttggcattaaggtttctttttcagtggctgccaaatgtttggtgatgaaggcagaaatgaatggctcaaaacttgggagaagagcaaaacctgaaggggccctccagaacaatgatgggctttatgatcctgactgcgatgagagcgggctctttaaggccaagcagtgcaacggcacctccatgtgctggtgtgtgaacactgctggggtcagaagaacagacaaggacactgaaataacctgctctgagcgagtgagaacctagtgagtggggctgcctatactacttgttttcatgctgttcagattcatttaattaaatttatttttgattatgtaatatgatttcatggtttagaattcagaagatatgagtgtccagtgaaaagcttccttctcattccagtccccctcgctacccattggacctccacagaattgatgttattgattattctataaccttccagagatagttgatgaatttgttatatatctgttttattatttttacataaatgatagcatactaggtataatttttcttttatatctttacttaacattattcagtatttcattgttgcattagtagtaaatgtatgtaatttaacctatgtatttgcttattgattgtgttttaaaagtgagatatgcttgttttagggattgtttaatgaaaaggcacagaaacccactcaagctagcttaagcaaaaaaagacttcattggaagggactagaaactggaaaggatgtcaggac

SEQ ID NO: 249 - DNA, 1066 bp, Homo sapiens
cccgggttcaagcaactctcctgccttagcctcctgagtagctgggactacagctataccacacctgactaatttttgtattttagtagagatggggtttcaccatgttggccaggctggtctccaactcctgacctcaggcaatccacccacctccacctcccaaagtgttggattacagttgtgagccaccatgcccgggcctttcatgccttttcatctttttagttgaacagggcatgacactgccagctaaactttgacttaatgtgactttatgtattgtgtccagagaacagagggtcaatattagaaaaggtgttccctcctgggtgtgtcctttatgaaggatgtgtaagggaagaaattataggaatagctactgcataaattttttttctcttagtccttataattcgagaattttaggattagcttattaggaaaatagtatggaagactgagttatagtcaactgacattgtctttttactttatagctggatcatcattgaactaaaacacaaagcaagagaaaaaccttatgatagtaaaagtttgcggacgtaagtgcaattaaatgcatcatattcttgcacagttggtggctcaaatcttccatcctacaccattagaaaaagcaagtctaaatgcttttttatatttctgaaaaataaagttacttgaaatagagttgcaagaatagcacagagattctgggaatacacttcactcagattcaccaattaacattttggcacatttgctttttatatgtgtatgtgtggatgaatatgtgtgtgtgctttacatcagtgtatctatgcatgtataaatatttttcccagaagcacatgagagcaagttgtagacatcaggcccctttacccctaagtacttcagtgtatgttttcctaagaacaaaaggcattcttttatataaaccactatacaacgatcaaatttaggaaaaatttttttttttttttttagacggagtctcgctctgtcacccaggctggcgtgcagtggcgtgatctcagctcactgcaacctgcgcctgccg

SEQ ID NO: 250 - DNA, 1064 bp, Homo sapiens
catcccaaagtgctgggattacaggcatgagccacctcacccgagccttgatgttccctcttaactaaaagcaggttatgcatttttgacaggaaaactacttaagcgatcttgtgtcctttataatacttcacattaggagttgcatgatgtcagcttgtccctttactagtaaagtaaactttggttaaagtggtatccaccaggtttttccactgtgaagttaccattctccctttgtaatccataaataatctatgggcagatacttggatactaagtaaatgttctttttctaattaaactggtacccagcagtttgaatatcaatggatgattccagcctgaatcaattattattatgatagttgcaaaatggcagaaaaattttaactttaatgacagttttagaccctgagctgtctgcttaaagagtagtgcttcttactgttgtgtggtacaaacatttttttttaatacagattttaaattctttacagtgcacttcagaaggagatcacaacgcgttatcaactggatccaaaatttatcacgagtattttggtatgattttttaataagtgagctttagcagacagttggtgagacagtatgttttgagtataaggacagccagtgatttaagtggtggttaaatgcacttactggagcaacagtttcggatctgggtacttaatgtgaatttcctgttactgtttttttttgtttgtttgtttctttaagacagactattgctctcttccccaggctggagtgtcatggcaagatctcggctcaatgtaacctctgcttccaaggttcaagcaattctcatgcctcagcctcccgaggagctgggactacaggcacatgtcaccatgcccagctaatttttgtatttttagtgtcggcggggttttgctatgttggccaggctggtctcgaactcctggcctcaagtgatctgtctgcctcagcctctcaaagtgttgggattacaggtgtgagccaccacgcccggcccattgtttttggttatcgttgttttccttccatagcctttg

SEQ ID NO: 251 - DNA, 1102 bp, Homo sapiens
tcaccacgcctggctaattttgtatttttagtagagatggggtttctccatgttggtcaggctggtcttgaactccggacctcaggtgatccgcccacctcagcctcccaaagtgctgggattacaggcatgagccactgcacccggccttacctttcatttctttagtaatttagttttaaagtagttctaatccaaataaaatactttcatatcttatttaaaaatcttttcaatataagaaaatcctcttaggaaaaattgtacattgtaattatgtttggttgcatggctgtcttatttccctttgatagatttagagacctcccaaagatttcttgattagtgataaacttagttatccactaatggaaaggaacagtgatgcatgtagattatagaaaatcaaacactgaatattctgattctcaattaatgttattttcaaatgattttgattatattagtattaatttgtattattcaatttttttccccagtatgagaataatgttatcactattgatctggttcaaaattcttctcaaaaaactcagaatgatgtggacatagctgatgtggcttattattttgaaaaagatgtgagtatcatcttctttattcctgtgttcaggaatgtagtctatcatgcctcaatgaattaaatatatttcatcacctttttatccacttacagatcaaccaaatggttcgctgctgccgttaattttgtcctccctgtcactcacatgcatcttgcttgtttgtatatttatgcctcttatcaaattgttctgcctaaaatatctcccctctttcttataattcttatttattatctacttggtggttacttagtttgtgcatatatgctcccctatgatatttataatttacacaaataaaagtctgttaaaaaagactgtaactgatatgattaaaatattttgttgaaactttaatatattatagtgaggtattttctgctgaaatatgaggtttgcttcaaaataatctgggcgggggtgaaaggatgaaaggaagaaaagatgaagtaagagaggctatgtgttgttggccttgcatctgggtgataggtaca

SEQ ID NO: 252 - DNA, 1201 bp, Homo sapiens
ttcttataattcttatttattatctacttggtggttacttagtttgtgcatatatgctcccctatgatatttataatttacacaaataaaagtctgttaaaaaagactgtaactgatatgattaaaatattttgttgaaactttaatatattatagtgaggtattttctgctgaaatatgaggtttgcttcaaaataatctgggcgggggtgaaaggatgaaaggaagaaaagatgaagtaagagaggctatgtgttgttggccttgcatctgggtgataggtacatgggcatcattgcactactctttctactttcgtgtatgttgaaaggttcctgtaataaacagttttttaaagttccaataaattagattgttatcactaaaaccataaagattcttggcagcggttcttttggcatacaatttgtatgtaattatatgtggccatggttggtttccttaaatatttttaattccttttctccttttcaatacaggttaaaggtgaatccttgtttcattctaagaaaatggacctgacagtaaatggggaacaactggatctggatcctggtcaaactttaatttattatgttgatgaaaaagcacctgaattctcaatgcagggtctaaaagctggtgttattgctgttattgtggttgtggtgatagcagttgttgctggaattgttgtgctggtgagtacagaacaagtaaaatttcatttaagggtatattttttcaagaaaaagtaatagtggctgggcgcggtggctcaccacacctgttatccctacactttgggaggctgagacaggtggatcacttgagcccaggagtttgagaccacactgggcaacatggtgaaaccttatctgtagtaaaaatacaaaaattagtcagatgtgatggcttgcacctgtggtcccatctacttaggaggctgatgtgggagtggtcagttgagtccaggaggtcaaagctgcagtgagccatgatcacaccactgcactccagcctgggcaacacagcaggaccctgtctcaaaaagaagaaaaaaggaaatatgaaaaagtaacatccatattccaaaacattcagggaaaaaaatcttcatttttaaataatttttttatggtgaatgaatctattgtatctctggtctctttttacaaaagtcattttatgaagcaagaaa

SEQ ID NO: 253 - DNA, 1045 bp, Homo sapiens
cctcggccccacaaagtaccggtgagccaccacgcccagcccaccttatttatttttaagagacagggtcttactctgtagcccaggctggagagcagtgatgccatctccactcactgcaacctctgcctcctgggttcaagcaattctggtgccttagcctcctgagtagctgggactacaggtgcgtgccatgacacctggctaatttttgtatttgtagtagagatggggtttcaccgtgttggctgggctggtctgaaactcctgacctcagatgatcttcccgcttcggcctcccaaagtgccgggattacaggcatgagccactccactggtgtgaaatttttaatttaagaagcaataaatgtttatggatagatgttaaaattagttttttttcagatcaaaattatgtccattaaaagcatatatgtctgtttagataatctttttttgaatagcagtcctaaaacaatagttgtctttcttccactcaggttatttccagaaagaagagaatggcaaagtatgagaaggctgaggtaaatggattacttacctaaatagaaaggccctgttgaatctcttactcctaatcactctaccttcctacacactgatgcatttcagttatactggagtccctttatactgttgtctttagggtcttagggacagtcttagaatgtactcttacctaaatattcttgcgtgagttccatggcagatcaccatctgttttctgcctcatagaagagtggaatgggaagcctatggtttttattctacaaagagtcaacatctaacagaatcttctgaaggcatactccagtggattcaccttggagaaactcattgtgactgatgatctgatttattatctctatgccagtgaaataatcatttaatatgaacttaatttgtcataatctattgtgtactaactagtctatactagtgtgacatcaaagtgtcagattgttagtgtgtttcagtcccttggaattgaatatgaacacttatccttgaaccctatcaataa

SEQ ID NO: 254 - DNA, 1457 bp, Homo sapiens
gcaaggattaaacataatcagtgtaaagtgttggtcccatgcttgccacataagaaaatatttgtcaacagagtggtagttgtcattatcattgtctcagtttgcctgtaactagttgtgtgatctgagacaaacactaattttgaacttgagtttccccacatgtaaaatgaaagattgataatagaaagtaaatcaattttttctagcattaaaaatagtatgcatttaataaaaatcttattcttaatgatctagcttacctccaacttgccctagtcactttggcgatcttgtctctaaatagaaccttgaaaacacttaaatgtgtgtttccttgcaatataactttttctttttttatttaaataagtcttataaatgtgggaaaaaattatcttgtgttcctttaatttcatttttatttaatactattttcagaatgaacaaaagattgaaaaattatttagaatttttttctgtgctttttcctgtttcagataaaggagatgggtgagatgcatagggaactcaatgcataactatataatttgaagattatagaagaagggaaatagcaaatggacacaaattacaaatgtgtgtgcgtgggacgaagacatctttgaaggtcatgagtttgttagtttaacatcatatatttgtaatagtgaaacctgtactcaaaatataagcagcttgaaactggctttaccaatcttgaaatttgaccacaagtgtcttatatatgcagatctaatgtaaaatccagaacttggactccatcgttaaaattatttatgtgtaacattcaaatgtgtgcattaaatatgcttccacagtaaaatctgaaaaactgatttgtgattgaaagctgcctttctatttacttgagtcttgtacatacatacttttttatgagctatgaaataaaacattttaaactgaatttcttaactttgacatttcaaatttcttcttctttttcttttcttttttttttttttttgagatggagtcccactctgttgccaggctggagtgcagtggcacaatctcggctcactgcaacttctgcctcctaggttcaagcgattcttctgcctcagcctcccgagtagctgactacaggcgcccaccaccattcctggctaatttttgtatttttagtagagacaaagtttcaccatattggccacgctagtctcgaactcctgacctcacgatccacccacctctacctcccatagtgctggggttacaggcgtgagccaccgcgcccggcctctttttttctttttgttttgttttttctttttttttttgagacaggatcttgctctgtggcctaggctggagtgtagtggtgcgatctcagctcactgcaggattcaagcgattctcctgcctcagcctaccaagtagctaggattacaggctcccactaccatgcccgg

SEQ ID NO: 255 - DNA, 1500 bp, Homo sapiens
aaaaattatttagaatttttttctgtgctttttcctgtttcagataaaggagatgggtgagatgcatagggaactcaatgcataactatataatttgaagattatagaagaagggaaatagcaaatggacacaaattacaaatgtgtgtgcgtgggacgaagacatctttgaaggtcatgagtttgttagtttaacatcatatatttgtaatagtgaaacctgtactcaaaatataagcagcttgaaactggctttaccaatcttgaaatttgaccacaagtgtcttatatatgcagatctaatgtaaaatccagaacttggactccatcgttaaaattatttatgtgtaacattcaaatgtgtgcattaaatatgcttccacagtaaaatctgaaaaactgatttgtgattgaaagctgcctttctatttacttgagtcttgtacatacatacttttttatgagctatgaaataaaacattttaaactgaatttcttaactttgacatttcaaatttcttcttctttttcttttcttttttttttttttttgagatggagtcccactctgttgccaggctggagtgcagtggcacaatctcggctcactgcaacttctgcctcctaggttcaagcgattcttctgcctcagcctcccgagtagctgactacaggcgcccaccaccattcctggctaatttttgtatttttagtagagacaaagtttcaccatattggccacgctagtctcgaactcctgacctcacgatccacccacctctacctcccatagtgctggggttacaggcgtgagccaccgcgcccggcctctttttttctttttgttttgttttttctttttttttttgagacaggatcttgctctgtggcctaggctggagtgtagtggtgcgatctcagctcactgcaggattcaagcgattctcctgcctcagcctaccaagtagctaggattacaggctcccactaccatgcccggctaatttttgtatttttagtagagaaaaggtttctttttcttttttcttttctttttttctttttttttttttgggggggtgagacagagcctaactctgttgcccaggctggagtgcagtggcacaatctcagctcactgcaacttctgcctcctgggttcaagcaattctcctgcctcagcttcccaagtagctgggactacagatgtgcaccaccatgcccggattatttttgtatttgtagtagagacagagtttcgccatgttggccaggctgatctcgaactcctgacctcaagtgatccacccaccttggtctcccaaagtgctgggattacatgtgtgagccaccatgcctggtcctatttactctttgttaagtggaagtggatcatcataaaggtcttgatcctcatagttttcactttgagtaggctgaggaagaggaagggttggtcttgctgtctctgggtcgcagaggcagaagaggtggaggagg

SEQ ID NO: 256 - DNA, 5460 bp, Homo sapiens
cgggcgcagggagccgccgccggggctgtaggcgccaaggccatgtccgactcgtgggtcccgaactccgcctcgggccaggacccagggggccgccggagggcctgggccgagctgctggcgggaagggtcaagagggaaaaatataatcctgaaagggcacagaaattaaaggaatcagctgtgcgcctcctgcgaagccatcaggacctgaatgcccttttgcttgaggtagaaggtccactgtgtaaaaaattgtctctcagcaaagtgattgactgtgacagttctgaggcctatgctaatcattctagttcatttataggctctgctttgcaggatcaagcctcaaggctgggggttcccgtgggtattctctcagccgggatggttgcctctagcgtgggacagatctgcacggctccagcggagaccagtcaccctgtgctgctgactgtggagcagagaaagaagctgtcttccctgttagagtttgctcagtatttattggcacacagtatgttctcccgtctttccttctgtcaagaattatggaaaatacagagttctttgttgcttgaagcggtgtggcatcttcacgtacaaggcattgtgagcctgcaagagctgctggaaagccatcccgacatgcatgctgtgggatcgtggctcttcaggaatctgtgctgcctttgtgaacagatggaagcatcctgccagcatgctgacgtcgccagggccatgctttctgattttgttcaaatgtttgttttgaggggatttcagaaaaactcagatctgagaagaactgtggagcctgaaaaaatgccgcaggtcacggttgatgtactgcagagaatgctgatttttgcacttgacgctttggctgctggagtacaggaggagtcctccactcacaagatcgtgaggtgctggttcggagtgttcagtggacacacgcttggcagtgtaatttccacagatcctctgaagaggttcttcagtcataccctgactcagatactcactcacagccctgtgctgaaagcatctgatgctgttcagatgcagagagagtggagctttgcgcggacacaccctctgctcacctcactgtaccgcaggctctttgtgatgctgagtgcagaggagttggttggccatttgcaagaagttctggaaacgcaggaggttcactggcagagagtgctctcctttgtgtctgccctggttgtctgctttccagaagcgcagcagctgcttgaagactgggtggcgcgtttgatggcccaggcattcgagagctgccagctggacagcatggtcactgcgttcctggttgtgcgccaggcagcactggagggcccctctgcgttcctgtcatatgcagactggttcaaggcctcctttgggagcacacgaggctaccatggctgcagcaagaaggccctggtcttcctgtttacgttcttgtcagaactcgtgccttttgagtctccccggtacctgcaggtgcacattctccacccacccctggttcccggcaagtaccgctccctcctcacagactacatctcattggccaagacacggctggccgacctcaaggtttctatagaaaacatgggactctacgaggatttgtcatcagctggggacattactgagccccacagccaagctcttcaggatgttgaaaaggccatcatggtgtttgagcatacggggaacatcccagtcaccgtcatggaggccagcatattcaggaggccttactacgtgtcccacttcctccccgccctgctcacacctcgagtgctccccaaagtccctgactcccgtgtggcgtttatagagtctctgaagagagcagataaaatccccccatctctgtactccacctactgccaggcctgctctgctgctgaagagaagccagaagatgcagccctgggagtgagggcagaacccaactctgctgaggagcccctgggacagctcacagctgcactgggagagctgagagcctccatgacagaccccagccagcgtgatgttatatcggcacaggtggcagtgatttctgaaagactgagggctgtcctgggccacaatgaggatgacagcagcgttgagatatcaaagattcagctcagcatcaacacgccgagactggagccacgggaacacatggctgtggacctcctgctgacgtctttctgtcagaacctgatggctgcctccagtgtcgctcccccggagaggcagggtccctgggctgccctcttcgtgaggaccatgtgtggacgtgtgctccctgcagtgctcacccggctctgccagctgctccgtcaccagggcccgagcctgagtgccccacatgtgctggggttggctgccctggccgtgcacctgggtgagtccaggtctgcgctcccagaggtggatgtgggtcctcctgcacctggtgctggccttcctgtccctgcgctctttgacagcctcctgacctgtaggacgagggattccttgttcttctgcctgaaattttgtacagcagcaatttcttactctctctgcaagttttcttcccagtcacgagatactttgtgcagctgcttatctccaggccttattaaaaagtttcagttcctcatgttcagattgttctcagaggcccgacagcctctttctgaggaggacgtagccagcctttcctggagacccttgcaccttccttctgcagactggcagagagctgccctctctctctggacacacagaaccttccgagaggtgttgaaagaggaagatgttcacttaacttaccaagactggttacacctggagctggaaattcaacctgaagctgatgctctttcagatactgaacggcaggacttccaccagtgggcgatccatgagcactttctccctgagtcctcggcttcagggggctgtgacggagacctgcaggctgcgtgtaccattcttgtcaacgcactgatggatttccaccaaagctcaaggagttatgaccactcagaaaattctgatttggtctttggtggccgcacaggaaatgaggatattatttccagattgcaggagatggtagctgacctggagctgcagcaagacctcatagtgcctctcggccacaccccttcccaggagcacttcctctttgagattttccgcagacggctccaggctctgacaagcgggtggagcgtggctgccagccttcagagacagagggagctgctaatgtacaaacggatcctcctccgcctgccttcgtctgtcctctgcggcagcagcttccaggcagaacagcccatcactgccagatgcgagcagttcttccacttggtcaactctgagatgagaaacttctgctcccacggaggtgccctgacacaggacatcactgcccacttcttcaggggcctcctgaacgcctgtctgcggagcagagacccctccctgatggtcgacttcatactggccaagtgccagacgaaatgccccttaattttgacctctgctctggtgtggtggccgagcctggagcctgtgctgctctgccggtggaggagacactgccagagcccgctgccccgggaactgcagaagctacaagaaggccggcagtttgccagcgatttcctctcccctgaggctgcctccccagcacccaacccggactggctctcagctgctgcactgcactttgcgattcaacaagtcagggaagaaaacatcaggaagcagctaaagaagctggactgcgagagagaggagctattggttttccttttcttcttctccttgatgggcctgctgtcgtcacatctgacctcaaatagcaccacagacctgccaaaggctttccacgtttgtgcagcaatcctcgagtgtttagagaagaggaagatatcctggctggcactctttcagttgacagagagtgacctcaggctggggcggctcctcctccgtgtggccccggatcagcacaccaggctgctgcctttcgctttttacagtcttctctcctacttccatgaagacgcggccatcagggaagaggccttcctgcatgttgctgtggacatgtacttgaagctggtccagctcttcgtggctggggatacaagcacagtttcacctccagctggcaggagcctggagctcaagggtcagggcaaccccgtggaactgataacaaaagctcgtctttttctgctgcagttaatacctcggtgcccgaaaaagagcttctcacacgtggcagagctgctggctgatcgtggggactgcgacccagaggtgagcgccgccctccagagcagacagcaggctgcccctgacgctgacctgtcccaggagcctcatctcttctgacgggacctgccactgcacaccagcccagctcccgtgtaaataatttattacaagcataacatggagctcttgttgcactaaaaagtggattacaaatctcctcgactgctttagtggggaaaggaatcaattatttatgaactgtccggccccgagtcactcagcgtttgcgggaaaataaaccactggtcccagagcagaggaaggctacttgagccggacaccaagcccgcctccagcaccaagggcgggcagcaccctccgaccctcccatgcgggtgcacacgaagggtgaggctgacacagccactgcggagtccaggctgctagaggtgctcatcctcactgccgtcctcaggtgggttcgggcttcaccgcctggccctctgtggtcacagaggggctcggtggcccaggtggtggttccgcctccaggggcagggccttgtcctgggtctgtgtcagcgggtgcaccatggacatgtgtacattgaggttgtgggccttctcaaaccgccggccacactggtcacaggcaaagtccagctcagtctcagccttgtgtttggtcatgtggtacttgagggatgcccgctgcctgcactggaacccacagacctcacacctgggggacagaggcagataagaaggtgcgagggccacagccctgggagggggtcctgactcacacttactgcaaaggcttggctcccgaatgtcgcatttggtggacgagaaggtgcttccgctgcttgaaggtttgtccacattcgtcacagatatagttccgcacctctgagaggggagagtccagtgagtccaggcccctgatgctccaacctcccggggggacgacgatgacaatgtgaaaccatcacagctgggaagacatttctgcacatggttcaccatgcagtgggcccaagcaaggggcctatgagggcctcgtttattaagatctttaaactgctttatacactgtcacgtggcttcatcagctgtgtgcatttcaggatggtttttaaagaaacctcagaaagctatttcctt

SEQ ID NO: 257 - DNA, 1673 bp, Homo sapiens
cgggcgcagggagccgccgccggggctgtaggcgccaaggccatgtccgactcgtgggtcccgaactccgcctcgggccaggacccagggggccgccggagggcctgggccgagctgctggcgggaagggtcaagagggaaaaatataatcctgaaagggcacagaaattaaaggaatcagctgtgcgcctcctgcgaagccatcaggacctgaatgcccttttgcttgaggtagaaggtccactgtgtaaaaaattgtctctcagcaaagtgattgactgtgacagttctgaggcctatgctaatcattctagttcatttataggctctgctttgcaggatcaagcctcaaggctgggggttcccgtgggtattctctcagccgggatggttgcctctagcgtgggacagatctgcacggctccagcggagaccagtcaccctgtgctgctgactgtggagcagagaaagaagctgtcttccctgttagagtttgctcagtatttattggcacacagtatgttctcccgtctttccttctgtcaagaattatggaaaatacagagttctttgttgcttgaagcggtgtggcatcttcacgtacaaggcattgtgagcctgcaagagctgctggaaagccatcccgacatgcatgctgtgggatcgtggctcttcaggaatctgtgctgcctttgtgaacagatggaagcatcctgccagcatgctgacgtcgccagggccatgctttctgattttgttcaaatgtttgttttgaggggatttcagaaaaactcagatctgagaagaactgtggagcctgaaaaaatgccgcaggtcacggttgatgtactgcagagaatgctgatttttgcacttgacgctttggctgctggagtacaggaggagtcctccactcacaagatcgtgaggtgctgagcttcagcagcccgctcctgagcacacttcctctgccagttacgataacgtgcgtgaggaggaggcgaccatgggaaagcccggggaacgctctggtcagccttttcctgtgaggatgaggtcggaaggtgcgcccactgcagtatcctgttccgcctctggaagtcctgcaccaatgtttgtcccactcactgtgacctcctcctgtgtggagtctccccttgctcctccttccctgggtgtgattcaggctctagagctggccctgcctctcagccccccacatttctagaacacactgtagctgtgcctctacagactcccgctgcctggcctccacagatcctgctcagattcaccagtaggcaaagcttggccctattagctttttctctccatggctctgtggagatgtgcggagacccttacaggtcgggaggcggaagctgaggagtgggggctgggtggaaggtggacatcggggtttggtggaaatggggctctggggtttgcttccctctagtgtgggcaggggaccttgaagtgaagtcttgagaaaccagtagaatttgccactgtttccaggccttgtcaaccttttcattctttattttgctcctcatttcccatccctcacagtaactgtttaactgctcaattaaatgtgttgtaccgttcggtacttttactgaaacagtgaataaagcactgtgtgatttcaaaaaaaaaaaaaaaaa

SEQ ID NO: 258 - DNA, 3008 bp, Homo sapiens
agcgcgctggcgggaggtttggagcagatggataccgtatcgacgtggggcctccggtatgttgccgctgcgttgagtttcataagtacaagccagacctttgatttacctaccctatcttctttactgatgaagctgaaactactttgtgatgcctattgtcccagatctttctgttaattgcctaacaacaaaccagtttagaaacatcaactggaatcaatttgcatttgaaaattagatcagcacaaagacttgatattgtggaatgactagcaaacaagcaatgtcatctaacgaacaagaaaggctcttgtgttataatggggaagtccttgttttccagttgtctaaaggaaattttgcagataaagagcctacaaaaacacccatattacatgtcagaagaatggtatttgacagaggaacaaaagtatttgttcagaagtccactggattttttaccataaaggaagaaaactctcatttaaaaatcatgtgttgcaactgtgtgtcagatttcagaactggaattaacctcccttacattgtgatagaaaaaaataaaaagaataatgtttttgaatattttttactaatccttcacagtactaataaatttgaaatgcgtttgagttttaaactaggctatgagatgaaggatggcctaagggtccttaatggccctttaattttatggaggcatgtcaaagcattcttctttatctcttctcaaactggcaaagttgttagtgtgtcaggtaacttttcctctattcagtgggcaggggagattgaaaatttaggtatggttttattgggactaaaggaatgttgtttatctgaggaagaatgtactcaagagccttcaaaatcagattatgcaatttggaataccaaattttgtgtatattctcttgaaagtcaagaagtattaagtgatatatacattattcctcctgcttacagcagtgtggtgacttatgtacatatttgtgcaactgagatcatcaaaaaccagttaagaatatctctcattgcccttactcgaaagaatcagctgatttcatttcagaatggaactcctaaaaatgtgtgccagcttccatttggagatccttgtgcagttcaacttatggattcaggtggaggaaacctctttttcgttgtatcctttatatccaataatgcttgtgctgtatggaaagagagctttcaggttgctgctaaatgggaaaaacttagcttagtactgatagatgactttattggaagtggaactgaacaagtactcctactttttaaggactccttgaactcagactgcctgacttcatttaaaataacggatcttggaaaaataaactattcgagtgaaccatcagattgcaatgaagatgacttatttgaagacaaacaagagaatcgttacctggtggttccacctctagaaacaggactgaaagtttgtttttcttcttttcgggaattacggcagcatctgttgcttaaggaaaaaattatttcaaaatcttacaaagctttaataaacctagttcaaggaaaagatgataatacgtcaagtgcagaggagaaggaatgtcttgttcctctttgtggtgaagaagaaaattctgtccatatcttagatgaaaagttatcagacaattttcaagattcagaacagctagtagagaagatatggtatcgtgtaatagatgatagcttggttgttggagtgaaaactacatcttctttgaagctgtccctgaatgatgtgactttatcattgttaatggatcaagcccatgactccagatttcggcttctaaagtgtcaaaatagggtgattaagttgagtacaaatcctttcccagcaccatacttgatgccatgtgaaataggattggaagcaaaaagggtcacgttgacccctgatagcaagaaagaggaaagctttgtttgtgaacacccatctaagaaagagtgtgtacagataattactgctgtaacatctctttcaccacttttaacattcagtaaattttgttgcactgtactgctacaaattatggagagagaaagtggtaactgtcctaaagatcgttatgttgtgtgtggcagagtttttttaagtctagaagatctttcaactgggaagtacctactgacatttccaaagaagaaacctatagagcacatggaagatctttttgcacttcttgcagcattccataaatcttgttttcaaatcacatcacccggctatgccctgaattcaatgaaggtgtggctcttagaacatatgaaatgtgaaataatcaaagaatttccagaagtgtacttttgtgaaagaccgggaagtttctatgggacactcttcacttggaaacagagaacaccattcgaagggattttaataatctattccaggaatcaaacagttatgttccagtgccttcataatctcatcagaattctccctataaactgtttcctcaaaaatctaaaatcaggaagtgagaatttcctaattgataatatggcatttactttggagaaggaactagtcacccttagttctctttcttctgccatagctaaacatgaaagcaattttatgcagaggtgtgaagtgagcaaaggaaagagtagtgtcgtcgcggctgctttatcagacagaagggaaaatatccatccctacagaaaagaacttcagagagaaaagaagaaaatgttgcaaacgaacctaaaagtgagtggtgccctttacagagaaataactttgaaagtagctgaggttcagttgaaatcagactttgctgcacagaaactgagtaatttataattataatttcaatttgatcatattttaaaatatgttttcaccaccatataagattttggttctacttgctatatgcctcctttgtaaaaataaacaccgaggcttactgtagtagaaactttagttttgatgatgcacaaaataaacagcagtggttctc

SEQ ID NO: 259 - DNA, 2887 bp, Homo sapiens
agcgcgctggcgggaggtttggagcagatggataccgtatcgacgtggggcctccggtatgttgccgctgcgttgaggtttagaaacatcaactggaatcaatttgcatttgaaaattagatcagcacaaagacttgatattgtggaatgactagcaaacaagcaatgtcatctaacgaacaagaaaggctcttgtgttataatggggaagtccttgttttccagttgtctaaaggaaattttgcagataaagagcctacaaaaacacccatattacatgtcagaagaatggtatttgacagaggaacaaaagtatttgttcagaagtccactggattttttaccataaaggaagaaaactctcatttaaaaatcatgtgttgcaactgtgtgtcagatttcagaactggaattaacctcccttacattgtgatagaaaaaaataaaaagaataatgtttttgaatattttttactaatccttcacagtactaataaatttgaaatgcgtttgagttttaaactaggctatgagatgaaggatggcctaagggtccttaatggccctttaattttatggaggcatgtcaaagcattcttctttatctcttctcaaactggcaaagttgttagtgtgtcaggtaacttttcctctattcagtgggcaggggagattgaaaatttaggtatggttttattgggactaaaggaatgttgtttatctgaggaagaatgtactcaagagccttcaaaatcagattatgcaatttggaataccaaattttgtgtatattctcttgaaagtcaagaagtattaagtgatatatacattattcctcctgcttacagcagtgtggtgacttatgtacatatttgtgcaactgagatcatcaaaaaccagttaagaatatctctcattgcccttactcgaaagaatcagctgatttcatttcagaatggaactcctaaaaatgtgtgccagcttccatttggagatccttgtgcagttcaacttatggattcaggtggaggaaacctctttttcgttgtatcctttatatccaataatgcttgtgctgtatggaaagagagctttcaggttgctgctaaatgggaaaaacttagcttagtactgatagatgactttattggaagtggaactgaacaagtactcctactttttaaggactccttgaactcagactgcctgacttcatttaaaataacggatcttggaaaaataaactattcgagtgaaccatcagattgcaatgaagatgacttatttgaagacaaacaagagaatcgttacctggtggttccacctctagaaacaggactgaaagtttgtttttcttcttttcgggaattacggcagcatctgttgcttaaggaaaaaattatttcaaaatcttacaaagctttaataaacctagttcaaggaaaagatgataatacgtcaagtgcagaggagaaggaatgtcttgttcctctttgtggtgaagaagaaaattctgtccatatcttagatgaaaagttatcagacaattttcaagattcagaacagctagtagagaagatatggtatcgtgtaatagatgatagcttggttgttggagtgaaaactacatcttctttgaagctgtccctgaatgatgtgactttatcattgttaatggatcaagcccatgactccagatttcggcttctaaagtgtcaaaatagggtgattaagttgagtacaaatcctttcccagcaccatacttgatgccatgtgaaataggattggaagcaaaaagggtcacgttgacccctgatagcaagaaagaggaaagctttgtttgtgaacacccatctaagaaagagtgtgtacagataattactgctgtaacatctctttcaccacttttaacattcagtaaattttgttgcactgtactgctacaaattatggagagagaaagtggtaactgtcctaaagatcgttatgttgtgtgtggcagagtttttttaagtctagaagatctttcaactgggaagtacctactgacatttccaaagaagaaacctatagagcacatggaagatctttttgcacttcttgcagcattccataaatcttgttttcaaatcacatcacccggctatgccctgaattcaatgaaggtgtggctcttagaacatatgaaatgtgaaataatcaaagaatttccagaagtgtacttttgtgaaagaccgggaagtttctatgggacactcttcacttggaaacagagaacaccattcgaagggattttaataatctattccaggaatcaaacagttatgttccagtgccttcataatctcatcagaattctccctataaactgtttcctcaaaaatctaaaatcaggaagtgagaatttcctaattgataatatggcatttactttggagaaggaactagtcacccttagttctctttcttctgccatagctaaacatgaaagcaattttatgcagaggtgtgaagtgagcaaaggaaagagtagtgtcgtcgcggctgctttatcagacagaagggaaaatatccatccctacagaaaagaacttcagagagaaaagaagaaaatgttgcaaacgaacctaaaagtgagtggtgccctttacagagaaataactttgaaagtagctgaggttcagttgaaatcagactttgctgcacagaaactgagtaatttataattataatttcaatttgatcatattttaaaatatgttttcaccaccatataagattttggttctacttgctatatgcctcctttgtaaaaataaacaccgaggcttactgtagtagaaactttagttttgatgatgcacaaaataaacagcagtggttctc

SEQ ID NO: 260 - DNA, 4612 bp, Homo sapiens
agaatgcactgctgacacgtgtgcgcgcgcgcggctccactgccgggcgaccgcgggaaaattccaaaaaaactcaaaaagccaatacgaggcaaagccaaattttcaagccacagatcccgggcggtggcttcctttccgccactgcccaaactgctgaagcagctcccgcgaggaccacccgatttaatgtgtgccgaccatttccttcagtgctggacaggctgctgtgaagggacatcaccttttcgctttttccaagatggctcaagattcagtagatctttcttgtgattatcagttttggatgcagaagctttctgtatgggatcaggcttccactttggaaacccagcaagacacctgtcttcacgtggctcagttccaggagttcctaaggaagatgtatgaagccttgaaagagatggattctaatacagtcattgaaagattccccacaattggtcaactgttggcaaaagcttgttggaatccttttattttagcatatgatgaaagccaaaaaattctaatatggtgcttatgttgtctaattaacaaagaaccacagaattctggacaatcaaaacttaactcctggatacagggtgtattatctcatatactttcagcactcagatttgataaagaagttgctcttttcactcaaggtcttgggtatgcacctatagattactatcctggtttgcttaaaaatatggttttatcattagcgtctgaactcagagagaatcatcttaatggatttaacactcaaaggcgaatggctcccgagcgagtggcgtccctgtcacgagtttgtgtcccacttattaccctgacagatgttgaccccctggtggaggctctcctcatctgtcatggacgtgaacctcaggaaatcctccagccagagttctttgaggctgtaaacgaggccattttgctgaagaagatttctctccccatgtcagctgtagtctgcctctggcttcggcaccttcccagccttgaaaaagcaatgctgcatctttttgaaaagctaatctccagtgagagaaattgtctgagaaggatcgaatgctttataaaagattcatcgctgcctcaagcagcctgccaccctgccatattccgggttgttgatgagatgttcaggtgtgcactcctggaaaccgatggggccctggaaatcatagccactattcaggtgtttacgcagtgctttgtagaagctctggagaaagcaagcaagcagctgcggtttgcactcaagacctactttccttacacttctccatctcttgccatggtgctgctgcaagaccctcaagatatccctcggggacactggctccagacactgaagcatatttctgaactgctcagagaagcagttgaagaccagactcatgggtcctgcggaggtccctttgagagctggttcctgttcattcacttcggaggatgggctgagatggtggcagagcaattactgatgtcggcagccgaaccccccacggccctgctgtggctcttggccttctactacggcccccgtgatgggaggcagcagagagcacagactatggtccaggtgaaggccgtgctgggccacctcctggcaatgtccagaagcagcagcctctcagcccaggacctgcagacggtagcaggacagggcacagacacagacctcagagctcctgcacaacagctgatcaggcaccttctcctcaacttcctgctctgggctcctggaggccacacgatcgcctgggatgtcatcaccctgatggctcacactgctgagataactcacgagatcattggctttcttgaccagaccttgtacagatggaatcgtcttggcattgaaagccctagatcagaaaaactggcccgagagctccttaaagagctgcgaactcaagtctagaaggcacgcaggccgtgtgggtgcccggcgtgagggatcaggctcgccagggccacaggacaggtgatgacctgtggccacgcatttgtggagtaagtgccctcgctgggctgtgagaatgagctgtacacatcttgggacaatctgctagtatctattttacaaaatgcagagccaggtccctcagcccagactcagtcagacatgttcactaatgactcaagtgagccttcggtactcctggtgcccgcccggccagaccgtcagcttgataattactaaagcaaaggcctgggtgggagaacaggtttctagtttttacccaagtcaagctgcacatctattatttaaaaattcaaagtcttagaaccaagaatttggtcatgaaccattaaagaatttagagagaacttagctctttttagactctttttaggagtcagggatctgggataaagccacactgtcttgctgtatggagaaattcttcaaggggagtcagggtccctcaggcttcccttgtgtctccctggacctgcctgacaggccacaggagcagacagcacacccaagcccgggcctccggcacactctttccactctgtatttgctaaatgatgctaactgctaccaaaaggcccttgggacatcagaggagccggcaggcgaaggtagaggatgtgttccagaaacattagaaggcaggattaattcagttagttagttctcttgttaaatggaaatgggaattggaaattcctgataaagaattggcctggctgggtgcagtggctcacacctgtgatcccagcactttgggaggccaaggcagggggattacttcagcccaggagttccagactgcctggctaacatggcaataccctatctctactaaaaatacaaaaattatcggggtgcaatggcatgcatctgtaatcccagctattcaagaggctgaggcatgaggatctcttgaacccgggaggtgggagttgtagtgagccgagatcatgacactgcactccagcctgggcaacagagcgagaccatctcttaaaaaaaggcattgttagtgtaatctcaaggttaacatttatttcatgtcagtacagggtgctttttcctttcagggacattctggaattgtattggttgtacattcttttgtgtctattctgtttgtcaagtgagtcaagacttgcttttgtccattttgatttgtgtgtattagtctgagtcttggctccgttttgaggtatgagcaaagttttgctggattagaagttaacctttagggaaattccttattttggtatgtggcaatgctaatagatccactgaagatctggaaaattccaggaacttttcacctgagcctttcttctgagaaatgctgcagtcagaagggtgtgctggtaaagtattttggtggcagctgccatcatggtcattgccttcatataacatgcttcgtgctcatggtcattgccttcatataacatgcttcgtgccatcatgatccttgccttcatataacaaacatgcttcgtcagaggtgttggggttgaaaaaggagctgcatgcttcactggagttgagggcctctctcctgttctgactttaagccagaacttgtggctgggccatggaagctgtgactcctctgtggacatggtggcagcagggaacccctagagagaggggccactgggaccaggcctcctgttgtggagggactcctgggacagtcctccaccctgtcctgtggtcctgtgtacagggttggcctcttcctcctcccctgccaggcctctgcccatgccccttccttccttctcctgggactggtgaagctaggcatctggaagacttcttcctagcctggaagccctgacctcggcccatctgcagaatctcccagttccttcacagctgccgagtcctctcacgggtgcggtggaggcggccttgccggtggtgctttctgggcagccaggggttcctgggtgggaggactgtccctctggggacgtggcactgaagtgcctgctggcttcatgtggccctttgccctttcccagcctgagagatgctcaaaggtggggagctgggggagccacccctcggccattccctccacctccaagacaggtggcggccgggcaggcactcttaagcccacctccccctcttgttgccttcgatttcggcaaagcctgggcaggtgccaccgggaaggaatggcatccgagatgctgggcggggacgcggcgtggccgagggggccttgacggcgttggcggggcctgggcacaggggcagccgcagggaggcagggatggcaaggcgtgaagccaccctggaaggaactggaccaaggtcttcagaggtgcgacagggtctggaatctgaccttactctagcaggagtttttgtagactctccctgatagtttagtttttgataaagcatgctggtaaaaccactaccctcagagagagccaaaaatacagaagaggcggagagcgcccctccaaccaggctgttattcccctggactccgtgacatctgtggaattttttagctctttaaaatctgtaatttgttgtctattttttcattctaaataaaacttcagtttgcacctaaaaaaaaaaaaaaaaaaaaaa

SEQ ID NO: 261 - DNA, 4554 bp, Homo sapiens
gggagccggcgctggggtcgcgcggaagggagcccccggagaggcgggagccgggtgttggcgttttggttctttttgttcattgagcgcaggcagctatgtcttcttcaaaggagaggagcaaagatttaatgtgtgccgaccatttccttcagtgctggacaggctgctgtgaagggacatcaccttttcgctttttccaagatggctcaagattcagtagatctttcttgtgattatcagttttggatgcagaagctttctgtatgggatcaggcttccactttggaaacccagcaagacacctgtcttcacgtggctcagttccaggagttcctaaggaagatgtatgaagccttgaaagagatggattctaatacagtcattgaaagattccccacaattggtcaactgttggcaaaagcttgttggaatccttttattttagcatatgatgaaagccaaaaaattctaatatggtgcttatgttgtctaattaacaaagaaccacagaattctggacaatcaaaacttaactcctggatacagggtgtattatctcatatactttcagcactcagatttgataaagaagttgctcttttcactcaaggtcttgggtatgcacctatagattactatcctggtttgcttaaaaatatggttttatcattagcgtctgaactcagagagaatcatcttaatggatttaacactcaaaggcgaatggctcccgagcgagtggcgtccctgtcacgagtttgtgtcccacttattaccctgacagatgttgaccccctggtggaggctctcctcatctgtcatggacgtgaacctcaggaaatcctccagccagagttctttgaggctgtaaacgaggccattttgctgaagaagatttctctccccatgtcagctgtagtctgcctctggcttcggcaccttcccagccttgaaaaagcaatgctgcatctttttgaaaagctaatctccagtgagagaaattgtctgagaaggatcgaatgctttataaaagattcatcgctgcctcaagcagcctgccaccctgccatattccgggttgttgatgagatgttcaggtgtgcactcctggaaaccgatggggccctggaaatcatagccactattcaggtgtttacgcagtgctttgtagaagctctggagaaagcaagcaagcagctgcggtttgcactcaagacctactttccttacacttctccatctcttgccatggtgctgctgcaagaccctcaagatatccctcggggacactggctccagacactgaagcatatttctgaactgctcagagaagcagttgaagaccagactcatgggtcctgcggaggtccctttgagagctggttcctgttcattcacttcggaggatgggctgagatggtggcagagcaattactgatgtcggcagccgaaccccccacggccctgctgtggctcttggccttctactacggcccccgtgatgggaggcagcagagagcacagactatggtccaggtgaaggccgtgctgggccacctcctggcaatgtccagaagcagcagcctctcagcccaggacctgcagacggtagcaggacagggcacagacacagacctcagagctcctgcacaacagctgatcaggcaccttctcctcaacttcctgctctgggctcctggaggccacacgatcgcctgggatgtcatcaccctgatggctcacactgctgagataactcacgagatcattggctttcttgaccagaccttgtacagatggaatcgtcttggcattgaaagccctagatcagaaaaactggcccgagagctccttaaagagctgcgaactcaagtctagaaggcacgcaggccgtgtgggtgcccggcgtgagggatcaggctcgccagggccacaggacaggtgatgacctgtggccacgcatttgtggagtaagtgccctcgctgggctgtgagaatgagctgtacacatcttgggacaatctgctagtatctattttacaaaatgcagagccaggtccctcagcccagactcagtcagacatgttcactaatgactcaagtgagccttcggtactcctggtgcccgcccggccagaccgtcagcttgataattactaaagcaaaggcctgggtgggagaacaggtttctagtttttacccaagtcaagctgcacatctattatttaaaaattcaaagtcttagaaccaagaatttggtcatgaaccattaaagaatttagagagaacttagctctttttagactctttttaggagtcagggatctgggataaagccacactgtcttgctgtatggagaaattcttcaaggggagtcagggtccctcaggcttcccttgtgtctccctggacctgcctgacaggccacaggagcagacagcacacccaagcccgggcctccggcacactctttccactctgtatttgctaaatgatgctaactgctaccaaaaggcccttgggacatcagaggagccggcaggcgaaggtagaggatgtgttccagaaacattagaaggcaggattaattcagttagttagttctcttgttaaatggaaatgggaattggaaattcctgataaagaattggcctggctgggtgcagtggctcacacctgtgatcccagcactttgggaggccaaggcagggggattacttcagcccaggagttccagactgcctggctaacatggcaataccctatctctactaaaaatacaaaaattatcggggtgcaatggcatgcatctgtaatcccagctattcaagaggctgaggcatgaggatctcttgaacccgggaggtgggagttgtagtgagccgagatcatgacactgcactccagcctgggcaacagagcgagaccatctcttaaaaaaaggcattgttagtgtaatctcaaggttaacatttatttcatgtcagtacagggtgctttttcctttcagggacattctggaattgtattggttgtacattcttttgtgtctattctgtttgtcaagtgagtcaagacttgcttttgtccattttgatttgtgtgtattagtctgagtcttggctccgttttgaggtatgagcaaagttttgctggattagaagttaacctttagggaaattccttattttggtatgtggcaatgctaatagatccactgaagatctggaaaattccaggaacttttcacctgagcctttcttctgagaaatgctgcagtcagaagggtgtgctggtaaagtattttggtggcagctgccatcatggtcattgccttcatataacatgcttcgtgctcatggtcattgccttcatataacatgcttcgtgccatcatgatccttgccttcatataacaaacatgcttcgtcagaggtgttggggttgaaaaaggagctgcatgcttcactggagttgagggcctctctcctgttctgactttaagccagaacttgtggctgggccatggaagctgtgactcctctgtggacatggtggcagcagggaacccctagagagaggggccactgggaccaggcctcctgttgtggagggactcctgggacagtcctccaccctgtcctgtggtcctgtgtacagggttggcctcttcctcctcccctgccaggcctctgcccatgccccttccttccttctcctgggactggtgaagctaggcatctggaagacttcttcctagcctggaagccctgacctcggcccatctgcagaatctcccagttccttcacagctgccgagtcctctcacgggtgcggtggaggcggccttgccggtggtgctttctgggcagccaggggttcctgggtgggaggactgtccctctggggacgtggcactgaagtgcctgctggcttcatgtggccctttgccctttcccagcctgagagatgctcaaaggtggggagctgggggagccacccctcggccattccctccacctccaagacaggtggcggccgggcaggcactcttaagcccacctccccctcttgttgccttcgatttcggcaaagcctgggcaggtgccaccgggaaggaatggcatccgagatgctgggcggggacgcggcgtggccgagggggccttgacggcgttggcggggcctgggcacaggggcagccgcagggaggcagggatggcaaggcgtgaagccaccctggaaggaactggaccaaggtcttcagaggtgcgacagggtctggaatctgaccttactctagcaggagtttttgtagactctccctgatagtttagtttttgataaagcatgctggtaaaaccactaccctcagagagagccaaaaatacagaagaggcggagagcgcccctccaaccaggctgttattcccctggactccgtgacatctgtggaattttttagctctttaaaatctgtaatttgttgtctattttttcattctaaataaaacttcagtttgcacctaaaaaaaaaaaaaaaaaaaaaa

SEQ ID NO: 262 - DNA, 2721 bp, Homo sapiens
agaatgcactgctgacacgtgtgcgcgcgcgcggctccactgccgggcgaccgcgggaaaattccaaaaaaactcaaaaagccaatacgaggcaaagccaaattttcaagccacagatcccgggcggtggcttcctttccgccactgcccaaactgctgaagcagctcccgcgaggaccacccgatttaatgtgtgccgaccatttccttcagtgctggacaggctgctgtgaagggacatcaccttttcgctttttccaagatggctcaagattcagtagatctttcttgtgattatcagttttggatgcagaagctttctgtatgggatcaggcttccactttggaaacccagcaagacacctgtcttcacgtggctcagttccaggagttcctaaggaagatgtatgaagccttgaaagagatggattctaatacagtcattgaaagattccccacaattggtcaactgttggcaaaagcttgttggaatccttttattttagcatatgatgaaagccaaaaaattctaatatggtgcttatgttgtctaattaacaaagaaccacagaattctggacaatcaaaacttaactcctggatacagggtgtattatctcatatactttcagcactcagatttgataaagaagttgctcttttcactcaaggtcttgggtatgcacctatagattactatcctggtttgcttaaaaatatggttttatcattagcgtctgaactcagagagaatcatcttaatggatttaacactcaaaggcgaatggctcccgagcgagtggcgtccctgtcacgagtttgtgtcccacttattaccctgacagatgttgaccccctggtggaggctctcctcatctgtcatggacgtgaacctcaggaaatcctccagccagagttctttgaggctgtaaacgaggccattttgctgaagaagatttctctccccatgtcagctgtagtctgcctctggcttcggcaccttcccagccttgaaaaagcaatgctgcatctttttgaaaagctaatctccagtgagagaaattgtctgagaaggatcgaatgctttataaaagattcatcgctgcctcaagcagcctgccaccctgccatattccgggttgttgatgagatgttcaggtgtgcactcctggaaaccgatggggccctggaaatcatagccactattcaggtgtttacgcagtgctttgtagaagctctggagaaagcaagcaagcagctgcggtttgcactcaagacctactttccttacacttctccatctcttgccatggtgctgctgcaagaccctcaagatatccctcggggacactggctccagacactgaagcatatttctgaactgctcagagaagcagttgaagaccagactcatgggtcctgcggaggtccctttgagagctggttcctgttcattcacttcggaggatgggctgagatggtggcagagcaattactgatgtcggcagccgaaccccccacggccctgctgtggctcttggccttctactacggcccccgtgatgggaggcagcagagagcacagactatgatggcatatgtcatggcaacctgcaggcatggtgatctccagccttgtggtcagaggcgttctcctgtccccaccgaggtggccagagacgagacgctgccagcccattctcctgcaaaacgaagacccttcttccccaaggtcatttgatctgttattgctcagctgccatatctgccccagggtcgcgtcctccaaggcgtgccctgcagaggcgggctgttctgaggggtgtgccggcagcagagcctggccacagccagggccctgtctcgctccccagcagcccggccagggcttgcttccatcttgactgtctcctttcttggatcagtcaacagatcctcacattactggctttatttacatctcttactaaagtaatcagatgatattaaccactttgcttctgaaaaagaagttggtcatttcctaaataacagagcagctaagtatgggactggataactgtctgtggcaaagacagttgttattttatgtggaatataataattacaggaagcaatgctttgattaaaggcattggcacctcccttgcaagcattgatttgctaggttcttaaaacttcaactgccagtgctctatgctgatcttagtagttaaagaggacaaggctcattttgtatagagccctgcttctcttggctttggcattttctgttgtttgaaaacacacagactaataaagatgtctgcgtattttgtttaaaggcttgcatggcataggaaagaaaaatagttttagattttaaaaagttgaaatttggtgataatttattttggatcagaaataaagctttgtgaaaaaattataacccacgtatgtatttgaggattgctgtctgattaaaaagaaagctttttatttcttcccctttaaaagatcacgttaagctaaggaaaatcctggttgatgtttttaacagtaataagatgtacggggcacatatggtttttaaagcccttttatattctgtcttatttgattctgaataagctaagttggtagatatgtgttcaattccatcacagtcaaaaggttactgacagagaatcacttttgaagtataaagaaataaattattcaataacacttaaaaaaaaaaaa

SEQ ID NO: 263 - DNA, 5204 bp, Homo sapiens
ggcctggcgggaaagtcgaaaactacgggcggcgacggcttctcggaagtaatttaagtgcacaagacattggtcaaaatggtttccaaaagaagactgtcaaaatctgaggataaagagagcctgacagaagatgcctccaaaaccaggaagcaaccactttccaaaaagacaaagaaatctcatattgctaatgaagttgaagaaaatgacagcatctttgtaaagcttcttaagatatcaggaattattcttaaaacgggagagagtcagaatcaactagctgtggatcaaatagctttccaaaagaagctctttcagaccctgaggagacacccttcctatcccaaaataatagaagaatttgttagtggcctggagtcttacattgaggatgaagacagtttcaggaactgccttttgtcttgtgagcgtctgcaggatgaggaagccagtatgggtgcatcttattctaagagtctcatcaaactgcttctggggattgacatactgcagcctgccattatcaaaaccttatttgagaagttgccagaatatttttttgaaaacaagaacagtgatgaaatcaacatacctcgactcattgtcagtcaactaaaatggcttgacagagttgtggatggcaaggacctcaccaccaagatcatgcagctgatcagtattgctccagagaacctgcagcatgacatcatcaccagcctacctgagatcctaggggattcccagcacgctgatgtggggaaagaactcagtgacctactgatagagaatacttcactcactgtcccaatcctggatgtcctttcaagcctccgacttgacccaaacttcctattgaaggttcgccagttggtgatggataagttgtcgtctattagattggaggatttacctgtgataataaagttcattcttcattccgtaacagccatggatacacttgaggtaatttctgagcttcgggagaagttggatctgcagcattgtgttttgccatcacggttacaggcttcccaagtaaagttgaaaagtaaaggacgagcaagttcctcaggaaatcaagaaagcagcggtcagagctgtattattctcctctttgatgtaataaagtcagctattagatatgagaaaaccatttcagaagcctggattaaggcaattgaaaacactgcctcagtatctgaacacaaggtgtttgacctggtgatgcttttcatcatctatagcaccaatactcagacaaagaagtacattgacagggtgctaagaaataagattcgatcaggctgcattcaagaacagctgctccagagtacattctctgttcattacttagttcttaaggatatgtgttcatccattctgtcgctggctcagagtttgcttcactctctagaccagagtataatttcatttggcagtctcctatacaaatatgcatttaagttttttgacacgtactgccagcaggaagtggttggtgccttagtgacccatatctgcagtgggaatgaagctgaagttgatactgccttagatgtccttctagagttggtagtgttaaacccatctgctatgatgatgaatgctgtctttgtaaagggcattttagattatctggataacatatcccctcagcaaatacgaaaactcttctatgttctcagcacactggcatttagcaaacagaatgaagccagcagccacatccaggatgacatgcacttggtgataagaaagcagctctctagcaccgtattcaagtacaagctcattgggattattggtgctgtgaccatggctggcatcatggcggcagacagaagtgaatcacctagtttgacccaagagagagccaacctgagcgatgagcagtgcacacaggtgacctccttgttgcagttggttcattcctgcagtgagcagtctcctcaggcctctgcactttactatgatgaatttgccaacctgatccaacatgaaaagctggatccaaaagccctggaatgggttgggcataccatctgtaatgatttccaggatgccttcgtagtggactcctgtgttgttccggaaggtgactttccatttcctgtgaaagcactgtacggactggaagaatacgacactcaggatgggattgccataaacctcctgccgctgctgttttctcaggactttgcaaaagatgggggtccggtgacctcacaggaatcaggccaaaaattggtgtctccgctgtgcctggctccgtatttccggttactgagactttgtgtggagagacagcataacggaaacttggaggagattgatggtctactagattgtcctatattcctaactgacctggagcctggagagaagttggagtccatgtctgctaaagagcgttcattcatgtgttctctcatatttcttactctcaactggttccgagagattgtaaatgccttctgccaggaaacatcacctgagatgaaggggaaggtgctcactcggttaaagcacattgtagaattgcaaataatcctggaaaagtacttggcagtcaccccagactatgtccctcctcttggaaactttgatgtggaaactttagatataacacctcatactgttactgctatttcagcaaaaatcagaaagaaaggaaaaatagaaaggaaacaaaaaacagatggcagcaagacatcctcctctgacacactttcagaagagaaaaattcagaatgtgaccctacgccatctcatagaggccagctaaacaaggagttcacagggaaggaagaaaagacatcattgttactacataattcccatgcttttttccgagagctggacattgaggtcttctctattctacattgtggacttgtgacgaagttcatcttagatactgaaatgcacactgaagctacagaagttgtgcaacttgggccccctgagctgcttttcttgctggaagatctctcccagaagctggagagtatgctgacacctcctattgccaggagagtcccctttctcaagaacaaaggaagccggaatattggattctcacatctccaacagagatctgcccaagaaattgttcattgtgtttttcaactgctgaccccaatgtgtaaccacctggagaacattcacaactattttcagtgtttagctgctgagaatcacggtgtagttgatggaccaggagtgaaagttcaggagtaccacataatgtcttcctgctatcagaggctgctgcagatttttcatgggctttttgcttggagtggattttctcaacctgaaaatcagaatttactgtattcagccctccatgtccttagtagccgactgaaacagggagaacacagccagcctttggaggaactactcagccagagcgtccattacttgcagaatttccatcaaagcattcccagtttccagtgtgctctttatctcatcagacttttgatggttattttggagaaatcaacagcttctgctcagaacaaagaaaaaattgcttcccttgccagacaattcctctgtcgggtgtggccaagtggggataaagagaagagcaacatctctaatgaccagctccatgctctgctctgtatctacctggagcacacagagagcattctgaaggccatagaggagattgctggtgttggtgtcccagaactgatcaactctcctaaagatgcatcttcctccacattccctacactgaccaggcatacttttgttgttttcttccgtgtgatgatggctgaactagagaagacggtgaaaaaaattgagcctggcacagcagcagactcgcagcagattcatgaagagaaactcctctactggaacatggctgttcgagacttcagtatcctcatcaacttgataaaggtatttgatagtcatcctgttctgcatgtatgtttgaagtatgggcgtctctttgtggaagcatttctgaagcaatgtatgccgctcctagacttcagttttagaaaacaccgggaagatgttctgagcttactggaaaccttccagttggacacaaggctgcttcatcacctgtgtgggcattccaagattcaccaggacacgagactcacccaacatgtgcctctgctcaaaaagaccctggaacttttagtttgcagagtcaaagctatgctcactctcaacaattgtagagaggctttctggctgggcaatctaaaaaaccgggacttgcagggtgaagagattaagtcccaaaattcccaggagagcacagcagatgagagtgaggatgacatgtcatcccaggcctccaagagcaaagccactgaggtatctctacaaaacccaccagagtctggcactgatggttgcattttgttaattgttctaagttggtggagcagaactttgcctacttatgtttattgtcaaatgcttctatgcccatttccattccctccataacagcttctgtgcttatataatttttgggacccagaagaaacaacgacacaatcttagaatcactcctgagtatctcgagttgtggcatttgttatagagttgacaattttctgcattatagcctctcattttccatgaattcatatctgaaaccattttagaagggagaagtcatcgaagtattttctgagtgttgagaagaatgagttaaaccatttaaacacatttgaaacatacaaaaatagaaatgtgaaagcatttggtgaaagccaaagcacagagtcagaagctgccaccttagagaactgaaataaaaatagaagttcttacgcttttttgtggtacagatgctttcgacaatttaaagaaagctaaataaaaatgtagacatggctggcgcagtggctcatgcttgtaatcctagcactttttgaggccaaggtaggaggattgcttgagtccgggagctcaaggcaaagctgcacaacataacaagaccctatctccacaaaaaaaatgaaaaataaacctgggtgcggtggctcacacctgtaatcccagcactttgggaggccgatgtgggcagatcacaaggtcaggagttcaagaccagcctggccaacatagtgaaaccccatctctactgaaaatacaaaaattagctgggtgtggtggcacgtgcctgttatctcagctacttgggaggctga

SEQ ID NO: 264 - DNA, 5134 bp, Homo sapiens
ggcctggcgggaaagtcgaaaactacgggcggcgacggcttctcggaagtaatttaagtgcacaagacattggtcaaaatggtttccaaaagaagactgtcaaaatctgaggataaagagagcctgacagaagatgcctccaaaaccaggaagcaaccactttccaaaaagacaaagaaatctcatattgctaatgaagttgaagaaaatgacagcatctttgtaaagcttcttaagatatcaggaattattcttaaaacgggagagagtcagaatcaactagctgtggatcaaatagctttccaaaagaagctctttcagaccctgaggagacacccttcctatcccaaaataatagaagaatttgttagtggcctggagtcttacattgaggatgaagacagtttcaggaactgccttttgtcttgtgagcgtctgcaggatgaggaagccagtatgggtgcatcttattctaagagtctcatcaaactgcttctggggattgacatactgcagcctgccattatcaaaaccttatttgagaagttgccagaatatttttttgaaaacaagaacagtgatgaaatcaacatacctcgactcattgtcagtcaactaaaatggcttgacagagttgtggatggcaaggacctcaccaccaagatcatgcagctgatcagtattgctccagagaacctgcagcatgacatcatcaccagcctacctgagatcctaggggattcccagcacgctgatgtggggaaagaactcagtgacctactgatagagaatacttcactcactgtcccaatcctggatgtcctttcaagcctccgacttgacccaaacttcctattgaaggttcgccagttggtgatggataagttgtcgtctattagattggaggatttacctgtgataataaagttcattcttcattccgtaacagccatggatacacttgaggtaatttctgagcttcgggagaagttggatctgcagcattgtgttttgccatcacggttacaggcttcccaagtaaagttgaaaagtaaaggacgagcaagttcctcaggaaatcaagaaagcagcggtcagagctgtattattctcctctttgatgtaataaagtcagctattagatatgagaaaaccatttcagaagcctggattaaggcaattgaaaacactgcctcagtatctgaacacaaggtgtttgacctggtgatgcttttcatcatctatagcaccaatactcagacaaagaagtacattgacagggtgctaagaaataagattcgatcaggctgcattcaagaacagctgctccagagtacattctctgttcattacttagttcttaaggatatgtgttcatccattctgtcgctggctcagagtttgcttcactctctagaccagagtataatttcatttggcagtctcctatacaaatatgcatttaagttttttgacacgtactgccagcaggaagtggttggtgccttagtgacccatatctgcagtgggaatgaagctgaagttgatactgccttagatgtccttctagagttggtagtgttaaacccatctgctatgatgatgaatgctgtctttgtaaagggcattttagattatctggataacatatcccctcagcaaatacgaaaactcttctatgttctcagcacactggcatttagcaaacagaatgaagccagcagccacatccaggatgacatgcacttggtgataagaaagcagctctctagcaccgtattcaagtacaagctcattgggattattggtgctgtgaccatggctggcatcatggcggcagacagaagtgaatcacctagtttgacccaagagagagccaacctgagcgatgagcagtgcacacaggtgacctccttgttgcagttggttcattcctgcagtgagcagtctcctcaggcctctgcactttactatgatgaatttgccaacctgatccaacatgaaaagctggatccaaaagccctggaatgggttgggcataccatctgtaatgatttccaggatgccttcgtagtggactcctgtgttgttccggaaggtgactttccatttcctgtgaaagcactgtacggactggaagaatacgacactcaggatgggattgccataaacctcctgccgctgctgttttctcaggactttgcaaaagatgggggtccggtgacctcacaggaatcaggccaaaaattggtgtctccgctgtgcctggctccgtatttccggttactgagactttgtgtggagagacagcataacggaaacttggaggagattgatggtctactagattgtcctatattcctaactgacctggagcctggagagaagttggagtccatgtctgctaaagagcgttcattcatgtgttctctcatatttcttactctcaactggttccgagagattgtaaatgccttctgccaggaaacatcacctgagatgaaggggaaggtgctcactcggttaaagcacattgtagaattgcaaataatcctggaaaagtacttggcagtcaccccagactatgtccctcctcttggaaactttgatgtggaaactttagatataacacctcatactgttactgctatttcagcaaaaatcagaaagaaaggaaaaatagaaaggaaacaaaaaacagatggcagcaagacatcctcctctgacacactttcagaagagaaaaattcagaatgtgaccctacgccatctcatagaggccagctaaacaaggagttcacagggaaggaagaaaagacatcattgttactacataattcccatgcttttttccgagagctggacattgaggtcttctctattctacattgtggacttgtgacgaagttcatcttagatactgaaatgcacactgaagctacagaagttgtgcaacttgggccccctgagctgcttttcttgctggaagatctctcccagaagctggagagtatgctgacacctcctattgccaggagagtcccctttctcaagaacaaaggaagccggaatattggattctcacatctccaacagagatctgcccaagaaattgttcattgtgtttttcaactgctgaccccaatgtgtaaccacctggagaacattcacaactattttcagtgtttagctgctgagaatcacggtgtagttgatggaccaggagtgaaagttcaggagtaccacataatgtcttcctgctatcagaggctgctgcagatttttcatgggctttttgcttggagtggattttctcaacctgaaaatcagaatttactgtattcagccctccatgtccttagtagccgactgaaacagggagaacacagccagcctttggaggaactactcagccagagcgtccattacttgcagaatttccatcaaagcattcccagtttccagtgtgctctttatctcatcagacttttgatggttattttggagaaatcaacagcttctgctcagaacaaagaaaaaattgcttcccttgccagacaattcctctgtcgggtgtggccaagtggggataaagagaagagcaacatctctaatgaccagctccatgctctgctctgtatctacctggagcacacagagagcattctgaaggccatagaggagattgctggtgttggtgtcccagaactgatcaactctcctaaagatgcatcttcctccacattccctacactgaccaggcatacttttgttgttttcttccgtgtgatgatggctgaactagagaagacggtgaaaaaaattgagcctggcacagcagcagactcgcagcagattcatgaagagaaactcctctactggaacatggctgttcgagacttcagtatcctcatcaacttgataaaggtatttgatagtcatcctgttctgcatgtatgtttgaagtatgggcgtctctttgtggaagcatttctgaagcaatgtatgccgctcctagacttcagttttagaaaacaccgggaagatgttctgagcttactggaaaccttccagttggacacaaggctgcttcatcacctgtgtgggcattccaagattcaccaggacacgagactcacccaacatgtgcctctgctcaaaaagaccctggaacttttagtttgcagagtcaaagctatgctcactctcaacaattgtagagaggctttctggctgggcaatctaaaaaaccgggacttgcagggtgaagagattaagtcccaaaattcccaggagagcacagcagatgagagtgaggatgacatgtcatcccaggcctccaagagcaaagccactgaggatggtgaagaagacgaagtaagtgctggagaaaaggagcaagatagtgatgagagttatgatgactctgattagaccccagataaattgttgcctgcttctgtgtctctgccagcctgtgatcattttgtgttagagtttgaaatccgctgtttgcctttcttactggtaggatccttttttgttcctctttttttttttttttttttttttttaaagacggggactcgctgtgtttcccaggctggagtgcagtgctgcaatcttggctcactgcaacctccatctcctaggttcaagcgattctcctgcctcagcctcctgagtagctgggacgacaggcacatgccaccatgcccagctaatttttgtatttttagtagatacggggttttaccatgtcggccagatggtctcaatctcctgaactcatgatccacctgcctcagcctcccaaagtgctgggattacaggcatgagccaccgctcccagccatattttgttcttaaagtggggtctttattaacttgtggacatcatggattgtctaacaccatcacagtccctggctcaggattctaatgtagcattatttattggtttggataaacccagctgtgctacactgcagagtaaaatctctgagtcatgattctggactttgggagctagttttgaaactctgatttattgtagaacttaggcttgtaccaattttacaaataaattctgttctaagttcaaaaaaaaaaaaaaaaaaaaaaaaaaaaaaaa

SEQ ID NO: 265 - DNA, 2565 bp, Homo sapiens
aacggctgcggcttcgggcggccgggtttctccggtctcccaacgccgaggagagcttgtaacaggcgctggagctggcccgccaccgccgcgtcagggacggcgctggagtcctccgttcccctcagcctctgagctgaggccccacaccagagtagggggcggcgcggcacccgtgccccggcatggcgacaccggacgcggggctccctggggctgagggcgtggagccggcgccctgggcgcagctggaggcccccgcccgcctcctgctgcaggcgctgcaggcggggcctgagggggcgcggcgcggcctgggggtgctccgggcgctgggcagccgcggctgggagcccttcgactggggtcgcttgctcgaggccctgtgccgggaggagccggtcgtgcaggggcctgacggccgtctggagctgaaaccactgttgctgcgattgccccggatatgccagaggaacctgatgtccctgctgatggccgttcggccatcgctgccggaaagtgggctcctctctgtgctgcagattgcccagcaggacctagcccctgacccagatgcctggctccgtgccctgggggaattgctgcgaagggatttgggggtggggacctccatggagggagcttctccactgtctgaaagatgccagagacagctccaaagtctatgtagggggctgggcctggggggcaggaggttgaaatccccccaggctccagaccctgaagaagaggagaacagggactcccagcagcctgggaaacgcagaaaggactcagaggaagaggctgccagtcctgaggggaagagggtccccaaaagattacggtgttgggaagaggaagaagatcatgagaaggagagacccgaacataagtcactggaatccctggcagatggaggaagtgcatctcctattaaggaccagcctgtcatggcagttaagactggcgaggacggttcgaatctggatgatgctaaaggtctggctgagagtttggagttgcccaaagctatccaggaccagcttcccaggctgcagcagctgctgaagaccttggaggaggggttagagggattggaggatgcccccccagttgagctacagcttcttcacgaatgtagtcccagccagatggacttgctgtgtgcccagctgcagctccctcagctctcagacctcggtctcctgcggctctgcacctggctgctggccctttcacctgatctcagcctcagcaatgctactgtgctgaccagaagcctctttcttggacggatcctctccttgacttcctcagcctcccgcctgcttacaactgccctgacctccttctgtgccaaatatacataccctgtctgcagcgccctccttgaccctgtgctccaggccccaggcacaggtcctgctcaaacagagttactgtgttgccttgtgaagatggagtccctggagccagatgcacaggttctaatgctgggacagatcttggagctgccctggaaggaggaaactttcttggtgttgcagtcactcctagagcggcaggtggagatgacccctgagaagttcagtgtcttaatggagaagctctgtaaaaaggggctggcagccaccacctccatggcctatgccaagctcatgctgacagtgatgaccaagtatcaggctaacatcactgagacccagaggctgggcctggctatggccctagaacctaacaccaccttcctgaggaagtccctgaaggccgccttgaaacatttgggcccctgaccatccaccaagggaccaccctcttggtgctccatcaccagcttcctgaagggcatttctttcttcaccaccttgtcttgagccctagcctgaggataaaggctgagcctggccatcccagattgcaactgcctccctgttacaggctgcatagggaatattggcttcccagccagcagggaggctcctgggctaagggagctcagctatattttctttttcatttcttttgtttttgagagaaggtattgctctgtcatccaggctggagtgcagtgatgcgattgatcatggctcactgtaacctctgcctcccaggctcgatcctcccatgtcagcctcccaagtagctgggactacatgcacatgacactatgcccagctaattttttattttgtagataatatgctggtcagggctggtcttgaactcctgagctcaagtgatcttcctgccttggcacccaaagtgttgagatttacaggtgtgagccaccacaccaggccagagctatatttccaaaggctgctggccccaggcacactcctcatcaattctcaggctgcagggacaaactttccgatagggctcagtaggatcaagccgacccagagtgggcatgggatgctccaggaggtctggggtaccagtgggctcagatgaagctcttgtgctcatgtatattatgaccttctgtgtttttgtttctgacttgaataatttatcaatggtgttgaataaaagcaagttcaataatgaaaaaaaaaa

SEQ ID NO: 266 - DNA, 3309 bp, Homo sapiens
tgaaagcggaagtagggccttcgcgcacctcatggaatcccttctgcagcacctggatcgcttttccgagcttctggcggtctcaagcactacctacgtcagcacctgggaccccgccaccgtgcgccgggccttgcagtgggcgcgctacctgcgccacatccatcggcgctttggtcggcatggccccattcgcacggctctggagcggcggctgcacaaccagtggaggcaagagggcggctttgggcggggtccagttccgggattagcgaacttccaggccctcggtcactgtgacgtcctgctctctctgcgcctgctggagaaccgggccctcggggatgcagctcgttaccacctggtgcagcaactctttcccggcccgggcgtccgggacgccgatgaggagacactccaagagagcctggcccgccttgcccgccggcggtctgcggtgcacatgctgcgcttcaatggctatagagagaacccaaatctccaggaggactctctgatgaagacccaggcggagctgctgctggagcgtctgcaggaggtggggaaggccgaagcggagcgtcccgccaggtttctcagcagcctgtgggagcgcttgcctcagaacaacttcctgaaggtgatagcggtggcgctgttgcagccgcctttgtctcgtcggccccaagaagagttggaacccggcatccacaaatcacctggagaggggagccaagtgctagtccactggcttctggggaattcggaagtctttgctgccttttgtcgcgccctcccagccgggcttttgactttagtgactagccgccacccagcgctgtctcctgtctatctgggtctgctaacagactggggtcaacgtttgcactatgaccttcagaaaggcatttgggttggaactgagtcccaagatgtgccctgggaggagttgcacaataggtttcaaagcctctgtcaggcccctccacctctgaaagataaagttctaactgccctggagacctgtaaagcgcaggatggagattttgaagtacctggtcttagcatctggacagacctcttattagctcttcgtagtggtgcatttaggaaaagacaagttttgggtctcagcgcaggcctcagttctgtataggcaatgctgtgttattacttgaatatagaatatatagtttacaaaatgaaaattacaatgttctcaccaaatatatgccttcgtgtgtccaaagtataattattttagatgctaattttgaatagtttattaaacagttataaatatgcaaagtagctggcatgtagtgtcacggattttctggatagaggaagtgattggaagtactccacttaaagccatggaattagcaatagtttgctttttaatagaaggcccatttgtaagaatgttgaaaatatgtgtaccgtttaaagaaaaagcagctttaaagtgacaaacaaaataccctttttcttttagtatggtttatttttctaggttttctgtccctccctcagtagtgaagagttttctttattcctggcagtgtcaggaatattggtttgaaaagctgttggcctatctggagtttggccttgttaacctagtattctaaccagttaaccagccttagtatgcattaaaattgtattgttcagaaagtttgtttctcattttctgcaaattcttactttgaaaatgaatcaccacatagtatgtccctttaaagcattgacgcacagacaaatgtttaaagcacagtaaatacgaatatatgcctttggatattaaattaatgcttgatgataaaagaatcaaacttttttttttttgagatggagtctcgctctgtcacccagactggagtgcagtggtgtgatcactgctcagtgcaacctctgcctcccaggatcaagcaattctgactcagcctcccaagtagctgggattacaggcgcaggccaccatgcccggctaattttttgtatttttagtagagacggggtttcaccatgctggccaggctggtctcaaacacctgaccttgtgatccgtccgccttggcctcccaaagtgctgggattacaggcgtgagccaccgcgcctggccaaaacaacattttaagtagaagatccaggttttagtgcagcttctgccgttaactaggttaataaatcacaaccttggggccacagttgccttatatgtaaatgaagtgtttagaataaaatagttaaatttccttatttttcccttggtggctgccctgtggaaacagtttagaatatttgttttgtgtgtaggaacctagttgtgttagtttacctgggtgttccacagctgatagtgattgccttgaataaattcaagggcaatttattcatttttactagggagatagacctttacagcaatcaagatatttttgtccatatccaggttagctggtaagaggatttttttggagaaaaaaatgatatttagaaagttaatttctaattccggaatggaataaaaacaatatgagtagtgtaatcttgtagaaaaagagttgtataatcttgtagaatttctcattctgtggtacaacccaggggtaaactattattccagtagtcagtacacttttctagataaatcttgagtgaaaaccagcaatttctttttccttgtggtctgattcctttttctaatccatgaaggccatcttgtagattacatttatcattaatgcaagaataaagacaattcctcctgtcagttgcgtgaattttttttaagaaacaacccagtgaagagttctaccatagcaaggcctaatgttagctttagctttagaaaataacagtttgtgaacttacttccctatatttgcagctgtatctcacactatgatttacaataaaattgtaaagattgacaatagacttaagaaataacattttaaaatctattttatacttaccatttattattctgttattttagtctccatatgttcattacatacataatcttatttaatcttcacaccaaaactgtattcttatgaatatacgctaaaagattaagtaaaatgcccaagggtataaacaaaagcaacatgaaagtggaagccgtatctgtcatttattttatttccagaagcctagcacagtgtccagcatatggtagatacttgtagtgtttgaataaatgaaaccagcattagagctttatatactttctcttaaggacttgaaaagattaggaatctacgcatacactgagagagaaaaaagtgagagga

SEQ ID NO: 267 - DNA, 2649 bp, Homo sapiens
aggaggacctgggggtgtggcagcgaggaagggccgagccacggactgtggggccgaaactcgctcccgcccaccctttctcgaggctgtggcctccgcgagagccgagcgggccgcaccgccggccgtgcgactgccccagtcagacacgaccccggcttctagcccgcctaagcctgtttggggttgctgactcgtttcctccccgagtttcccgcgggaactaactcttcaagaggaccaaccgcagcccagagcttcgcagacccggccaaccagaggcgaggttgagagcccggcgggccgcggggagagagcgtcccatctgtcctggaaagcctgggcgggtggattgggaccccgagagaagcaggggagctcggcggggtgcagaagtgcccaggcccctccccgctggggttgggagcttgggcaggccagcttcacccttcctaagtccgcttctggtctccgggcccagcctcggccaccatgtcccgccagaccacctctgtgggctccagctgcctggacctgtggagggaaaagaatgaccggctcgttcgacaggccaaggtggctcagaactccggtctgactctgaggcgacagcagttggctcaggatgcactggaagggctcagagggctcctccatagtctgcaagggctccctgcagctgttcctgttcttcccttggagctgactgtcacctgcaacttcattatcctgagggcaagcttggcccagggtttcacagaggatcaggcccaggatatccagcggagcctagagagagtgctggagacacaggagcagcaggggcccaggttggaacaggggctcagggagctgtgggactctgtccttcgtgcttcctgccttctgccggagctgctgtctgccctgcaccgcctggttggcctgcaggctgccctctggttgagtgctgaccgtcttggggacctggccttgttactagagaccctgaatggcagccagagtggagcctctaaggatctgctgttacttctgaaaacttggagtcccccagctgaggaattagatgctccattgaccctgcaggatgcccagggattgaaggatgtcctcctgacagcatttgcctaccgccaaggtctccaggagctgatcacagggaacccagacaaggcactaagcagccttcatgaagcggcctcaggcctgtgtccacggcctgtgttggtccaggtgtacacagcactggggtcctgtcaccgtaagatgggaaatccacagagagcactgttgtacttggttgcagccctgaaagagggatcagcctggggtcctccacttctggaggcctctaggctctatcagcaactgggggacacaacagcagagctggagagtctggagctgctagttgaggccttgaatgtcccatgcagttccaaagccccgcagtttctcattgaggtagaattactactgccaccacctgacctagcctcaccccttcattgtggcactcagagccagaccaagcacatactagcaagcaggtgcctacagacggggagggcaggagacgctgcagagcattacttggacctgctggccctgttgctggatagctcggagccaaggttctccccacccccctcccctccagggccctgtatgcctgaggtgtttttggaggcagcggtagcactgatccaggcaggcagagcccaagatgccttgactctatgtgaggagttgctcagccgcacatcatctctgctacccaagatgtcccggctgtgggaagatgccagaaaaggaaccaaggaactgccatactgcccactctgggtctctgccacccacctgcttcagggccaggcctgggttcaactgggtgcccaaaaagtggcaattagtgaatttagcaggtgcctcgagctgctcttccgggccacacctgaggaaaaagaacaaggggcagctttcaactgtgagcagggatgtaagtcagatgcggcactgcagcagcttcgggcagccgccctaattagtcgtggactggaatgggtagccagcggccaggataccaaagccttacaggacttcctcctcagtgtgcagatgtgcccaggtaatcgagacacttactttcacctgcttcagactctgaagaggctagatcggagggatgaggccactgcactctggtggaggctggaggcccaaactaaggggtcacatgaagatgctctgtggtctctccccctgtacctagaaagctatttgagctggatccgtccctctgatcgtgacgccttccttgaagaatttcggacatctctgccaaagtcttgtgacctgtagctgccacgttttgaagagcttgagctgggtccccagtgggctgtctctctgtggggagggctttctgcttcaccatcattaggaatgtgaccattcctatataattcctggactggtgagattggtggtaggcctgtgaaatttgccctagttactaccattctcgttttggaggaaacaatctctgccaccaccaagtcattgactttgctcgaggcaccttttttcctgtttctccttttctgttgtcgagtaaaatttcatatttataaaaaaaaaaaaaaaaaa

SEQ ID NO: 268 - DNA, 4749 bp, Homo sapiens
tcttgttgttacgggtaacggaagtgtggcggcgttgggttgagcgggctttttggaagtttgtggcggagttctgtgatatgagcaacaatggaccagaagattttatctctagcagcagaaaaaacagcagacaaactgcaagaatttcttcaaaccctgagagaaggtgatttgactaatctccttcagaatcaagcagtgaaaggaaaagttgctggagcactcctgagagccatcttcaaaggttccccctgctctgaggaagctggaacacttaggagacgtaagatatacacttgttgtatccagttggtggaatcgggggatttgcagaaagaaatagcgtctgagatcataggattactgatgctggaggctcaccattttccaggaccattattggttgaattagccaatgagtttattagtgctgtcagagaaggcagcctagtgaatggaaaatctttggagttactacctatcattctcactgccctggctacgaaaaaggaaaatctggcttatggaaaaggtgtactgagtggggaagaatgtaagaaacagttgattaacaccctgtgttctggcaggtgggatcagcaatatgtaatccaactcacctccatgttcaaggatgtccctctgactgcagaagaggtggaatttgtggtggaaaaagcattgagcatgttctccaagatgaatcttcaagaaataccacctttggtctatcagcttctggttctctcctccaagggaagcagaaagagtgttttggaaggaatcatagccttcttcagtgcactagataagcagcacaatgaggaacagagtggtgacgagctattggatgttgtcactgtgccatcaggtgaacttcgtcatgtggaaggcaccattattctacacattgtgtttgccatcaaattggactatgaactaggcagagaactcgtgaaacacttaaaggtaggacagcaaggagattccaataataacttaagtcccttcagcattgctcttcttctgtctgtaacaagaatacaaagatttcaggaccaggtgcttgatcttttaaagacttcggttgtaaagagctttaaggatcttcaactcctccaaggctcaaaatttcttcagaatctagttcctcatagatcttatgtttcaaccatgatcttggaagtagtgaagaatagcgttcatagctgggaccatgttactcagggcctcgtagaacttggtttcattttgatggattcatatgggccaaagaaggttcttgatggaaaaactattgaaaccagcccaagtctttctagaatgccaaaccagcatgcatgtaagctcggagctaatatcctgttggaaacttttaagatccatgagatgatcagacaagaaattttggagcaggtcctcaacagggttgttaccagagcatcttctcccatcagtcatttcttagacctgctttcaaatatcgtcatgtatgcacccttagttcttcaaagttgttcttctaaagtcacagaagcttttgactatttgtcctttctgccccttcagactgtacaaaggctgcttaaggcagtgcagccccttctcaaagtcagcatgtcaatgagagactgcttgatacttgtccttcggaaagctatgtttgccaaccagcttgatgcccgaaaatctgcagttgctgggtttttgctgctcctgaagaactttaaagttttaggcagcctgtcatcctctcagtgcagtcagtctctcagtgtcagtcaggttcatgtggatgttcacagccattacaattctgtcgccaatgaaactttttgccttgagatcatggatagtttgaggagatgcttaagccagcaagctgatgttcgactcatgctttatgaggggttttatgatgttcttcgaaggaactctcagctggctaattcagtcatgcaaactctgctctcacagttaaaacagttctatgagccaaaacctgatctgctgcctcctctgaaattagaagcttgtattctgacccaaggagataagatctctctacaagaaccactggattatctgctgtgttgtattcagcattgtttggcctggtataagaatacagtcatacccttacagcagggagaggaggaagaggaggaggaagaggcattctacgaagacctagatgatatattggagtccattactaatagaatgattaagagtgagctggaagactttgaactggataaatcagcagatttttctcagagcaccagtattggcataaaaaataatatctgtgcttttcttgtgatgggagtttgtgaggttttaatagaatacaatttctccataagtagtttcagtaagaataggtttgaggacattctgagcttatttatgtgttacaaaaaactctctgacattcttaatgaaaaagcgggtaaagccaaaactaaaatggccaacaagacaagtgatagtcttttgtccatgaaatttgtgtccagtcttctcactgctcttttcagggatagtatccaaagccaccaagaaagcctttctgttctcaggtccagcaatgagtttatgcgctatgcagtgaatgtagctctgcagaaagtacagcagctaaaggaaacagggcatgtgagtggccctgatggccaaaacccagaaaagatctttcagaacctctgtgacataactcgagtcttgctatggagatacacttcaattcctacttcagtggaagagtcgggaaagaaagagaaaggaaagagcatctcactgctgtgcttggagggtttacagaaaatattcagtgctgtgcaacagttctatcagcccaagattcagcagtttctcagagctctggatgtcacagataaggaaggagaagagagagaagatgcagatgtcagtgtcactcagagaacagcattccagatccggcaatttcagaggtccttgttgaatttacttagcagtcaagaggaagattttaatagcaaagaagccctcctgctagtcacggttcttaccagtttgtccaagttactggagccctcctctcctcagtttgtgcagatgttatcctggacatcaaagatttgcaaggaaaacagccgggaggatgccttgttttgcaagagcttgatgaacttgctcttcagcctgcatgtttcgtataagagtcctgtcattctgctgcgtgacttgtcccaggatatccacgggcatctgggagatatagaccaggatgtagaggtggagaaaacaaaccactttgcaatagtgaatttgagaacggctgcccccactgtctgtttacttgttctgagtcaggccgagaaggttctagaagaagtggactggctaatcaccaagcttaagggacaagtgagccaagaaaccttatcagaagaggcctcttctcaggcaaccctaccaaatcagcctgttgagaaagctatcatcatgcaactgggaactctgcttacatttttccacgagctggtgcagacagctctgccatcaggcagctgtgtggacaccttgttaaaggacttgtgcaaaatgtacaccacacttacagcccttgtcagatattatctccaggtgtgtcagagctccggaggaattccaaaaaatatggaaaagctggtgaagctgtctggttctcatctgacccccctgtgttattctttcatttcttacgtacagaataagagtaagagcctgaactatacgggagagaaaaaggagaaacctgctgccgttgccacagccatggccagagttcttcgggaaaccaagccaatccctaacctcatctttgccatagaacagtatgaaaaatttctcatccacctttctaagaagtccaaggtgaacctgatgcagcacatgaagctcagcacctcacgagacttcaagatcaaaggaaacatcctagacatggttcttcgagaggatggtgaagatgaaaatgaagagggcactgcatcagagcatgggggacagaacaaagaaccagccaagaagaaaaggaaaaaataaatgaaatgcctgagttaatgtgaactttggggcttctgcttcatttttacccaacaagcaacaatgccccttgtcctgtagtccacaccgatgttggcatcttggttctgaacccactgaattcaactgcaccttcagttagaaggaatcttcttggcaggtcctgctactgaaaaatggctggccttaggcaagcccttttgcaaaaagcacagctgaaagcctgagtttgggagcctgcaccaccccgatgaagctccacgggagcaaatacagagcctccaggcagtgctatggtccaggctggcttcgtttttccaaggagcctttggtgagttcaattatctggtaaatatccagcgcttcacctgaaagatagtgcaaattggttaggatgccacctcaagaactgtaactgagagctcagaagtgagcaaaggagcttaatgctaaggtcaaaaggagagtgaaaggttgagaacaattgccacgaacggtaatgttacatgttaggagggtctgttttctttttatataagtgtgtcttagatatattttaaatagaaaataagctttctgatttacttgtttggtatttaaagcacagtttgtttttctgtcacctatagagtgcaagaatgcactctatagaataaattatctttaaacatt

SEQ ID NO: 269 - DNA, 4569 bp, Homo sapiens
tcttgttgttacgggtaacggaagtgtggcggcgttgggttgagcgggctttttggaagtttgtggcggagttctgtgatatgagcaacaatggaccagaagattttatctctagcagcagaaaaaacagcagacaaactgcaagaatttcttcaaaccctgagagaaggtgatttgactaatctccttcagaatcaagcagtgaaaggaaaagttgctggagcactcctgagagccatcttcaaaggttccccctgctctgaggaagctggaacacttaggagacgtaagatatacacttgttgtatccagttggtggaatcgggggatttgcagaaagaaatagcgtctgagatcataggattactgatgctggaggctcaccattttccaggaccattattggttgaattagccaatgagtttattagtgctgtcagagaaggcagcctagtgaatggaaaatctttggagttactacctatcattctcactgccctggctacgaaaaaggaaaatctggcttatggaaaaggtgtactgagtggggaagaatgtaagaaacagttgattaacaccctgtgttctggcaggtgggatcagcaatatgtaatccaactcacctccatgttcaaggatgtccctctgactgcagaagaggtggaatttgtggtggaaaaagcattgagcatgttctccaagatgaatcttcaagaaataccacctttggtctatcagcttctggttctctcctccaagggaagcagaaagagtgttttggaaggaatcatagccttcttcagtgcactagataagcagcacaatgaggaacagagtggtgacgagctattggatgttgtcactgtgccatcaggtgaacttcgtcatgtggaaggcaccattattctacacattgtgtttgccatcaaattggactatgaactaggcagagaactcgtgaaacacttaaaggtaggacagcaaggagattccaataataacttaagtcccttcagcattgctcttcttctgtctgtaacaagaatacaaagatttcaggaccaggtgcttgatcttttaaagacttcggttgtaaagagctttaaggatcttcaactcctccaaggctcaaaatttcttcagaatctagttcctcatagatcttatgtttcaaccatgatcttggaagtagtgaagaatagcgttcatagctgggaccatgttactcagggcctcgtagaacttggtttcattttgatggattcatatgggccaaagaaggttcttgatggaaaaactattgaaaccagcccaagtctttctagaatgccaaaccagcatgcatgtaagctcggagctaatatcctgttggaaacttttaagatccatgagatgatcagacaagaaattttggagcaggtcctcaacagggttgttaccagagcatcttctcccatcagtcatttcttagacctgctttcaaatatcgtcatgtatgcacccttagttcttcaaagttgttcttctaaagtcacagaagcttttgactatttgtcctttctgccccttcagactgtacaaaggctgcttaaggcagtgcagccccttctcaaagtcagcatgtcaatgagagactgcttgatacttgtccttcggaaagctatgtttgccaaccagcttgatgcccgaaaatctgcagttgctgggtttttgctgctcctgaagaactttaaagttttaggcagcctgtcatcctctcagtgcagtcagtctctcagtgtcagtcaggttcatgtggatgttcacagccattacaattctgtcgccaatgaaactttttgccttgagatcatggatagtttgaggagatgcttaagccagcaagctgatgttcgactcatgctttatgaggggttttatgatgttcttcgaaggaactctcagctggctaattcagtcatgcaaactctgctctcacagttaaaacagttctatgagccaaaacctgatctgctgcctcctctgaaattagaagcttgtattctgacccaaggagataagatctctctacaagaaccactggattatctgctgtgttgtattcagcattgtttggcctggtataagaatacagtcatacccttacagcagggagaggaggaagaggaggaggaagaggcattctacgaagacctagatgatatattggagtccattactaatagaatgattaagagtgagctggaagactttgaactggataaatcagcagatttttctcagagcaccagtattggcataaaaaataatatctgtgcttttcttgtgatgggagtttgtgaggttttaatagaatacaatttctccataagtagtttcagtaagaataggtttgaggacattctgagcttatttatgtgttacaaaaaactctctgacattcttaatgaaaaagcgggtaaagccaaaactaaaatggccaacaagacaagtgatagtcttttgtccatgaaatttgtgtccagtcttctcactgctcttttcagagtcttgctatggagatacacttcaattcctacttcagtggaagagtcgggaaagaaagagaaaggaaagagcatctcactgctgtgcttggagggtttacagaaaatattcagtgctgtgcaacagttctatcagcccaagattcagcagtttctcagagctctggatgtcacagataaggaaggagaagagagagaagatgcagatgtcagtgtcactcagagaacagcattccagatccggcaatttcagaggtccttgttgaatttacttagcagtcaagaggaagattttaatagcaaagaagccctcctgctagtcacggttcttaccagtttgtccaagttactggagccctcctctcctcagtttgtgcagatgttatcctggacatcaaagatttgcaaggaaaacagccgggaggatgccttgttttgcaagagcttgatgaacttgctcttcagcctgcatgtttcgtataagagtcctgtcattctgctgcgtgacttgtcccaggatatccacgggcatctgggagatatagaccaggatgtagaggtggagaaaacaaaccactttgcaatagtgaatttgagaacggctgcccccactgtctgtttacttgttctgagtcaggccgagaaggttctagaagaagtggactggctaatcaccaagcttaagggacaagtgagccaagaaaccttatcagaagaggcctcttctcaggcaaccctaccaaatcagcctgttgagaaagctatcatcatgcaactgggaactctgcttacatttttccacgagctggtgcagacagctctgccatcaggcagctgtgtggacaccttgttaaaggacttgtgcaaaatgtacaccacacttacagcccttgtcagatattatctccaggtgtgtcagagctccggaggaattccaaaaaatatggaaaagctggtgaagctgtctggttctcatctgacccccctgtgttattctttcatttcttacgtacagaataagagtaagagcctgaactatacgggagagaaaaaggagaaacctgctgccgttgccacagccatggccagagttcttcgggaaaccaagccaatccctaacctcatctttgccatagaacagtatgaaaaatttctcatccacctttctaagaagtccaaggtgaacctgatgcagcacatgaagctcagcacctcacgagacttcaagatcaaaggaaacatcctagacatggttcttcgagaggatggtgaagatgaaaatgaagagggcactgcatcagagcatgggggacagaacaaagaaccagccaagaagaaaaggaaaaaataaatgaaatgcctgagttaatgtgaactttggggcttctgcttcatttttacccaacaagcaacaatgccccttgtcctgtagtccacaccgatgttggcatcttggttctgaacccactgaattcaactgcaccttcagttagaaggaatcttcttggcaggtcctgctactgaaaaatggctggccttaggcaagcccttttgcaaaaagcacagctgaaagcctgagtttgggagcctgcaccaccccgatgaagctccacgggagcaaatacagagcctccaggcagtgctatggtccaggctggcttcgtttttccaaggagcctttggtgagttcaattatctggtaaatatccagcgcttcacctgaaagatagtgcaaattggttaggatgccacctcaagaactgtaactgagagctcagaagtgagcaaaggagcttaatgctaaggtcaaaaggagagtgaaaggttgagaacaattgccacgaacggtaatgttacatgttaggagggtctgttttctttttatataagtgtgtcttagatatattttaaatagaaaataagctttctgatttacttgtttggtatttaaagcacagtttgtttttctgtcacctatagagtgcaagaatgcactctatagaataaattatctttaaacatt

SEQ ID NO: 270 - DNA, 1753 bp, Homo sapiens
agcggactgcgcatgtgcaggacccagcaggtctagagcttttctgtgtttctccggacttcgagccatggcggtgacggaagcgagcctgttgcgccagtgccccctgcttctgccccagaaccggtcgaaaaccgtgtatgagggattcatctcggctcagggaagagacttccaccttaggatagtgttgcctgaagatttacaactgaagaatgcaagattattatgtagttggcagctgagaacaatacttagtggataccatcgaatagtacaacagagaatgcagcactctcctgatctaatgagctttatgatggagttgaagatgcttttggaagttgccttaaagaatagacaagagctgtatgcactacctcctcctccccagttctactcaagccttattgaagagataggaactcttggttgggataaacttgtgtatgcggatacctgcttcagtaccatcaagttaaaagcagaagatgcttctggtagagagcatttaatcactctcaagttgaaggcaaagtatcctgcagaatcaccagattattttgtggattttcctgttccattttgtgcctcctggacacctcaggtaaattctcctcagagctccttaataagcatttatagtcagtttttggcagcaatagaatcactaaaggcattctgggatgttatggatgaaatcgatgagaagacctgggtacttgagccagaaaaacctccacggagtgcaacagcacgcagaattgcattaggtaataatgtttccataaatatagaggtagaccccaggcatcctactatgcttcctgagtgcttctttcttggagctgaccatgtggtaaaacccctgggaattaagctgagcaggaacatacatttgtgggatccagaaaatagtgtgttacaaaatttgaaagatgttttagaaattgattttccagctcgtgctatcctggaaaaatctgattttactatggattgtggaatttgttatgcttatcaacttgacggtaccattcctgatcaagtgtgtgataattctcagtgtggacaacctttccatcaaatatgcttatatgagtggctgagaggactactaactagtagacagagttttaacatcatatttggtgaatgtccatattgtagtaagccaattaccttaaaaatgtctggaaggaaacactgaaataagaatacaacatttcggtgaagagctggaaacttaaaaaattatcaaaaggaattttggtatcatcttcagagaaaaaataaagcaagaaatactaacatcaaaaggacaggtatgatgatgcgataataataaacatctgcgtttgtctcttcactaagagtaaactgggaaattgtaggccaaagtccagttgaactttctaagtctgtgatccccgtgctgactgtggaagtgtatttataccaagatggagatcttgacttcttgaatatatctggactggtaaaatcttgatgaggctcataaaatgagtttgggaattgtgtatagctgattttttgtgggaaactgtttacttcattcaaaggttcttgagactcttgatatttctgtcttctccttgtgctttcctatggaaaaaatacatatatagtttagtttgttagacgtgagttatccaagtatttattttgtgtagtgtgtaagaatgctaaataaaatgttatacaagatcaaaaaaaaaaaaaaaaaaaaaaa

SEQ ID NO: 271 - DNA, 1738 bp, Homo sapiens
agcggactgcgcatgtgcaggacccagcaggtctagagcttttctgtgtttctccggacttcgagccatggcggtgacggaagcgagcctgttgcgccagtgccccctgcttctgccccagaaccggtcgaaaaccgtgtatgagggattcatctcggctcagggaagagacttccaccttaggatagtgttgcctgaagatttacaactgaagaatgcaagattattatgtagttggcagctgagaacaatacttagtggataccatcgaatagtacaacagagaatgcagcactctcctgatctaatgagctttatgatggagttgaagatgcttttggaagttgccttaaagaatagacaagagctgtatgcactacctcctcctccccagttctactcaagccttattgaagagataggaactcttggttgggataaacttgtgtatgcggatacctgcttcagtaccatcaagttaaaagcagaagatgcttctggtagagagcatttaatcactctcaagttgaaggcaaagtatcctgcagaatcaccagattattttgtggattttcctgttccattttgtgcctcctggacacctcagagctccttaataagcatttatagtcagtttttggcagcaatagaatcactaaaggcattctgggatgttatggatgaaatcgatgagaagacctgggtacttgagccagaaaaacctccacggagtgcaacagcacgcagaattgcattaggtaataatgtttccataaatatagaggtagaccccaggcatcctactatgcttcctgagtgcttctttcttggagctgaccatgtggtaaaacccctgggaattaagctgagcaggaacatacatttgtgggatccagaaaatagtgtgttacaaaatttgaaagatgttttagaaattgattttccagctcgtgctatcctggaaaaatctgattttactatggattgtggaatttgttatgcttatcaacttgacggtaccattcctgatcaagtgtgtgataattctcagtgtggacaacctttccatcaaatatgcttatatgagtggctgagaggactactaactagtagacagagttttaacatcatatttggtgaatgtccatattgtagtaagccaattaccttaaaaatgtctggaaggaaacactgaaataagaatacaacatttcggtgaagagctggaaacttaaaaaattatcaaaaggaattttggtatcatcttcagagaaaaaataaagcaagaaatactaacatcaaaaggacaggtatgatgatgcgataataataaacatctgcgtttgtctcttcactaagagtaaactgggaaattgtaggccaaagtccagttgaactttctaagtctgtgatccccgtgctgactgtggaagtgtatttataccaagatggagatcttgacttcttgaatatatctggactggtaaaatcttgatgaggctcataaaatgagtttgggaattgtgtatagctgattttttgtgggaaactgtttacttcattcaaaggttcttgagactcttgatatttctgtcttctccttgtgctttcctatggaaaaaatacatatatagtttagtttgttagacgtgagttatccaagtatttattttgtgtagtgtgtaagaatgctaaataaaatgttatacaagatcaaaaaaaaaaaaaaaaaaaaaaa

SEQ ID NO: 272 - DNA, 7144 bp, Homo sapiens
gagttttgtgcgaaggaaaccgatggggatcggaaccgtagcggttgagctgctgctgctacggatatctgacagaagccttcggtggttgtcggcctaatgagcggacggcaaagaacgctttttcagacgtggggctcaagtatctcccgatcatctgggactccgggttgcagctccggaactgagcgacctcagagccctggcagctccaaggcgcctttgccagcagcagcggaggctcagctggagtcggacgatgatgtgttgcttgtcgcggcgtacgaggctgagcggcagttgtgtctagagaatggcgggttctgcacctccgcgggcgccctgtggatttaccctaccaattgcccagtgcgggactaccagctgcacatttcccgggctgctctgttttgcaatacgctggtgtgtctgcctaccggactgggaaagacctttattgccgccgtggtcatgtacaatttctaccgctggttcccttcaggaaaggtggtcttcatggccccaacgaaacccttggtgacacagcagatcgaggcttgctaccaggtgatgggtatcccgcaatcccacatggccgaaatgacagggtctacacaagcttccaccaggaaggaaatatggtgcagtaagagagtgctttttcttacacctcaggtcatggtaaatgacctttctagaggagcttgtcccgctgctgaaataaagtgtttagttattgatgaagctcataaagctctcggaaactatgcttattgccaggttgtaagagaactagtcaaatatacaaatcactttagaatcttggctctaagtgccacaccaggtagtgatataaaggctgtgcaacaagttattactaacctgctaattgggcagatagagcttcgttctgaagattctccagatattttgacatattctcatgaaagaaaagttgaaaagcttattgttccgcttggtgaagaacttgcagccatccaaaagacctatatccagattttggaatcatttgctcgttctttgattcagaggaatgttttgatgagaagggatatcccaaatctaacaaaatatcagataattctggcaagagatcagtttaggaaaaacccatctccgaatattgtgggaatacaacaaggcataatcgagggagagtttgctatttgtattagtttatatcatggttatgaattattgcagcaaatgggaatgagatcattatatttcttcctttgtggaattatggatggaactaaagggatgacacggtcaaaaaatgaacttggccgaaatgaagacttcatgaaactctataatcatctagagtgtatgtttgcacgtacacgtagtacttcagcaaatggtatttctgctatccaacaaggagataaaaataaaaaatttgtttatagtcatccaaagttaaagaaattagaagaagttgtaattgaacacttcaagtcatggaatgctgaaaacactactgaaaagaaacgtgatgagacccgagttatgatcttctcttcatttcgagatagtgttcaagaaattgcagaaatgctttcacagcatcagccaattattagagtaatgacttttgtcggccatgcctcagggaaaagcacgaagggttttacccagaaggagcaactggaggtagtgaaacagtttcgtgacggtggttacaacacgctggtttctacctgtgtgggtgaagaaggtttggatataggagaagttgatcttataatatgttttgattcccagaagagcccaattcgtcttgtacaacgaatgggtagaactggccgtaaacgtcaaggcaggatagttattatcctttctgaaggacgagaggaacgtatttataatcagagtcagtccaacaaaagaagtatatataaagctatttcaagtaacaggcaggtccttcatttttaccaaagaagtccacgaatggttcctgatggaatcaacccaaaattacacaaaatgttcatcacacatggtgtctatgaaccagagaagccttctcggaacttgcagcgaaagtcatctatcttttcctatagggatggaatgaggcaaagtagcctaaagaaagattggttcttatcagaagaagaatttaaattatggaacagactttatagattaagggacagtgatgaaattaaagagataacattgcctcaagttcagttttcttctttacaaaatgaggaaaacaaaccagctcaagaatcaaccactggaattcatcaactctctctctctgaatggagactgtggcaagatcatcctttgcctacacatcaagttgatcactcagatcgatgccgccattttataggccttatgcaaatgatagagggaatgagacacgaagagggagaatgcagctatgaattggaagttgaatcttatttacaaatggaagatgttacctcaacatttattgctcccaggaatgaatctaataatcttgccagtgacacctttatcactcacaagaaatcgtcatttataaagaacataaatcaaggcagttcatcctcagtgatagaatctgatgaagaatgtgctgaaattgttaaacaaactcatatcaaacctactaaaattgtttctttaaagaaaaaagtgtctaaagaaataaaaaaagatcagcttaaaaaagaaaataatcacggtattatagattctgtagataatgacagaaattccactgttgaaaatatttttcaagaagacctaccaaatgataaaaggacatcagatacagatgaaattgctgccacatgtactattaatgaaaatgttattaaagaaccgtgtgtgttattaacagagtgtcagtttacaaataaatccactagttcacttgctggaaatgttttagattctggttataacagtttcaatgatgaaaaatctgtttcatctaacttatttcttccattcgaagaagagctttatattgttagaacagatgaccaattttataattgtcactcattgacaaaagaggtactagctaatgtagagagatttttatcttattctcctccgcctctcagtggactctcagacttggaatatgaaattgctaagggtactgcacttgagaatttgcttttcttaccctgtgcagagcatttacgaagtgataaatgcacctgtttgctgtcacattcagctgtgaattctcaacagaatttagaattgaattcacttaaatgtataaattatccatctgaaaaaagttgcctttatgatatacctaatgataatatttctgatgagccaagtctctgtgactgtgatgtacataaacataatcaaaatgaaaatttagtacctaacaatcgtgttcaaatacacagaagccctgcacagaatttagttggagagaacaatcatgatgttgataacagtgacctcccagtattgtccactgatcaagatgaaagtttgctgttatttgaagatgttaatacagagttcgacgatgtgagtctttcacccttgaacagtaaaagcgaatctttacctgtgtcagacaaaactgctattagtgaaacgcctctggtctctcagttcttaatttctgatgaacttttgttggacaataattctgaactccaagatcaaatcacccgtgatgctaatagttttaaatctcgtgatcagagaggtgtacaggaagaaaaagtgaagaatcatgaggatatttttgattgctctagggatttattttctgttacctttgatttaggattctgtagtccagattctgatgatgaaatattggaacatacatcagatagcaatagacctctagatgatctatatggaaggtatttggaaattaaggagataagtgatgcaaattatgtttcgaatcaagcactaataccaagagatcatagtaaaaattttactagtggaactgttattatcccatcaaatgaagatatgcagaatccaaattatgtacatttgccactgagtgcagcaaaaaatgaagaattgttatctcctggttattctcagttttctttaccagtgcaaaaaaaagttatgagtacaccactctctaaatcaaacacattgaactcattttctaagataagaaaggaaatacttaagacaccagattctagtaaggaaaaagtaaacctacaaagattcaaagaagcattgaattcaacttttgattattcagaattttctctagaaaagtctaaaagcagtggtccaatgtatctgcataaatcctgtcattctgttgaagatggacaattattaacaagtaacgaaagtgaagatgacgagattttccgaagaaaagttaaaagagcaaaaggaaatgttttaaactctcctgaggatcagaaaaatagtgaagttgattctccacttcatgctgtcaaaaagcgcagatttcctataaacagatcagaattatcatctagtgatgagagtgagaattttcccaaaccatgttcacaattagaagacttcaaggtttgtaacgggaatgccagaagaggcatcaaagtcccaaagagacagagtcacttaaagcatgtagctaggaagtttttagatgatgaagcagaactttctgaagaagatgcagaatatgtttcatcagatgaaaatgatgagtcagaaaatgaacaagattcctcattacttgactttttaaatgatgaaactcaactttcacaggctataaatgattctgaaatgagagctatttacatgaaatctttgcgtagtccaatgatgaacaataagtacaaaatgattcataagacacataaaaacataaacattttctcgcagattcctgaacaagatgaaacctatttagaggatagtttttgtgttgatgaagaggagtcttgcaaaggccaatcaagtgaagaagaagtttgtgttgattttaacttaataactgatgattgctttgcaaatagtaaaaagtataaaactcgacgtgcagtaatgctaaaagaaatgatggaacaaaattgtgcacattcaaaaaagaaattatccagaattattttaccagatgattcaagtgaggaggagaacaatgtaaatgataaaagagaatctaatattgcggttaacccaagcactgttaagaagaacaaacaacaggaccattgtttaaattcagtgccttctggatcttctgcgcagtccaaggtgcgttctactccaagagttaatccattagcaaagcagagcaaacagacatcgctgaatttaaaggatacaatttccgaagtctcagacttcaaacctcagaatcataatgaagtccagtctaccacaccacccttcactactgttgattcacagaaagactgtagaaaatttccagttccacagaaggatggtagtgctttggaggattctagcacttcaggggcatcctgttccaagtcaagaccacatttagctgggacacatacttctcttagacttccgcaggaaggaaaaggaacctgtattcttgtaggtggtcatgaaatcacttctggattagaagtaatttcttccctaagagcaattcatgggttgcaagtagaagtttgtcctcttaatggctgtgattacatcgtgagtaatcgcatggtggtggaaaggaggtctcaatctgagatgttaaatagtgtcaataagaacaagttcattgagcagatccagcacctgcagagtatgtttgaaagaatatgtgtgattgtggaaaaggacagagaaaaaacaggagacacatcaaggatgtttaggagaacaaagagctatgacagcctgctgactaccttaattggcgctggaatccgaattcttttcagttcctgccaagaagaaaccgcagatttgctaaaggaactgtctttagtggaacaaagaaagaatgttggtattcatgttccaacagtggtgaatagtaataaaagtgaggcactccagttttatttaagtattcccaatataagttatataactgcattaaatatgtgtcaccagttttcatctgtgaaaaggatggctaacagctcacttcaagaaatctccatgtatgcacaagtaactcatcagaaggctgaggagatctatagatatattcactatgtatttgacatacaaatgttaccaaatgatcttaaccaagatagactgaaatctgatatataatcaagctgctcaagatggggttttcaaagacctctcacaatattaaatgcacttcaataatcattgctgttttatgtttatttgtaaataagagaatattttatttaaatattttatattgtatacatttttatttatagattatagaaattattaaaaaagaaaaatctgatgttcagtgatcattttgactagattataaaactaatttttcttattaaataaaacaaggtttattaaaagtgttactaaggatagtttaagaaagtaaaagctaagctagagatatactttggaatgtttcccaaaattaaagttgtactgttgtgataaatagtaaagttgacatgtctatgactacagccaacttgtcgattttccctatgtgtagatagtatacttttaagtgtactgattctaaatacatgtacttggtaaggtgtgggtgatgggtgggttgtgagataaatgacccagtaactaggaaagtagaaaacttaactgaatgtttatctgaccaaaggtgtgtcccagttaagtactgtcaaatctattaatatgaactctgatatggtttggctgtgtccccaaccaaaatctcatcttgacttgtaatctgaattataatcccaatatattggggagggacctcctggaacgtgattagctcatgggggcggttcccccatgctgttctagtgatagttctcagaggatctgatggttttataagcttttcctctgttcactctgcagttctcttgcctactgccatgtggaaaaggaaacgtttgcttcccctccaccatgattgtaagttcccgaggcctccccagccatgcaggactgtgagtcaattaaacatcttttccttataaattaaaaaaaaaaaaaaaaa

SEQ ID NO: 273 - DNA, 3723 bp, Homo sapiens
gagtcacgcgcctgggtgtcggcggggctgcgggaccgcgagtgagtgtggtcgctcctggttctgccagctcccctgagagcctgaacccgggcttgagagcctcgccaccccgggtgacatccctgccgtgggcttgggggctctgggtgtgattccgccggtccgggtcccgcagcgaccacctacccagcgcagtcaggggcggggctgggacccagagcgggaccccggctgccgagtccaggtgtcccgcgggcctcgatttggggagcagaaaacgccaggtcttcaagggtgtctgccaccaccatgcctgacccatttggcagcagcctcgtgtgtggtggtctggtgtggacggtggaagcgtgattctgctgagtgtcagtgtgaccactcgtgctcagccgtatctcagcaggaggacaggtgccggagcagctcgtgcagctaagcagccaactgcagaaacgtcaggcctgttgcagtctccaaggcaccatgaatgccatcgtggctctctgccacttctgcgagctccacggcccccgcactctcttctgcacggaggtgctgcacgccccacttcctcaaggggatgggaatgaggacagtcctggccagggtgagcaggcggaagaagaggaaggtggcattcagatgaacagtcggatgcgtgcgcacagccccgcagagggggccagcgtcgagtccagcagcccggggcccaaaaagtcggacatgtgcgagggctgccggtcacttgctgcagggcacccgggatatatcagccatgataaagagacctccattaaatacgtcagccaccagcaccccagccacccccagctcttcagcattgtccgccaggcctgtgtccggagcctgagctgtgaggtctgccctggccgtgaaggccccatcttcttcggagatgagcagcacggctttgtgttcagccacaccttcttcatcaaggacagcctggccaggggcttccagcgctggtacagcatcatcaccatcatgatggaccggatctacctcatcaactcctggcccttcctgctggggaaggtccggggaatcatcgatgagctccagggcaaggcgctcaaggtgtttgaggcagagcagtttggatgcccacagcgtgctcagaggatgaacacagccttcacgccattcctacaccagaggaacggcaacgccgcccgctcgctgacatcgctgacaagtgatgacaacctgtgggcgtgcctgcacacctcctttgcctggctcctgaaggcgtgtggcagccggctgaccgagaagctcctggaaggtgctccgaccgaggataccttggtccagatggagaagctcgctgatttagaagaggaatcagaaagctgggacaactctgaggctgaagaggaggagaaagcccctgtgttgccagagagtacagaagggcgggagctgacccagggcccggcagagtcctcctctctctcaggctgtgggagctggcagccccggaagctgccagtcttcaagtccctccggcacatgaggcaggtcctgggtgccccttctttccgcatgctggcctggcacgttctcatggggaaccaggtgatctggaaaagcagagacgtggacctcgtccagtcagcttttgaagtacttcggaccatgcttcccgtgggctgcgtccgcatcatcccatacagcagccagtacgaggaggcctatcggtgcaacttcctggggctcagcccgcacgtgcagatccccccccacgtgctctcctcagagtttgctgtcatcgtggaggtccacgcagccgcacgttccaccctccaccctgtggggtgtgaggatgaccagtctctcagcaagtacgagtttgtggtgaccagtgggagccctgtagctgcagaccgagtgggccccaccatcctgaataagattgaagcggctctgaccaaccagaacctgtctgtggatgtggtggaccagtgcctcgtctgcctcaaggaggagtggatgaacaaagtgaaggtgctttttaagttcaccaaggtggacagtcgacccaaagaggacacacagaagctgctgagcatcctgggtgcgtccgaggaggacaatgtcaagctgctgaagttctggatgactggcctgagcaagacctacaagtcacacctcatgtccacggtccgcagccccacagcctcggagtctcggaactgacccgtcacacacacctgcctaaagacagggatggctgtccacaggatcctccagccccgtgagagggactgtcccttgagtttctcaactgctggaaggagctgtgtcccagcaaggaagggaaaccatcagggctgggctcggccctgtcaggtttggggcctgtgtgcttcccagactctccctccagccgttggaatcgctgaagatggcaatgaaaggcggagggatgatgggctctctctgtgttcaaactccttggagagacgactaggaggacagcttgcctcccaggccccttgtggacttagactcaaaacccgcaggagaaacaggtccgactcagtatgcagtcgcaataacatgtctgctcccgaggttaacattcaagcgtttctactttgaaattcagcaagagtttctgggccttatgtttgagggtaccttttgctgcagttgtgaatattcagtacattgccagctcttggtcactgagtgattgagttagggctccgcaagagactttggggagtgaagtggatctcttcctcatcttttggtcctctgaaatgtgtgttctgaagccatggggctcgtcttctggggtgttcccctgcaggtgctggtgaaggtaacctggggcttaatgatggagtccctgatcatttttgcacaagacaggttgctgaggggtcggcaagcatctgacttgcccaatcccctggatatggtgagccccgccatgcttttattctgtatcgcttttgtctttattgctgctttcaacatttacgtttggttacagttaactattttcggagtgtggtgattgaagacaatttcatcatcccactgtacttttttttttgagagggagtttcactcttgttgcccaggctggagtgcaatggcacgatcttggctcactgcaacctctgcctcctgggttcaagcaattctcctgcctcagcctccagagtagctggaactacaggtgcccgccactatgcccagctaatttttgtattttttagtagagacggggtttcaccgtgttggccgggctggtctcaaactcctgacctcaggtgatccacccacctcagcctcccaaagtgctgggattacaagcgtgagccactgtgcctggcccttttttttttttttttttttttttttaaagagatggcatcttgctatgtcgtccaggctggtcttgaactcctgagttcaagcagtcctcctgcttcaacatacagctacaggtaccccccactatacatttttaataaggattcatggctcagagggattttctgatggttttgctgatttgtttctagtttttttgtgtttatatttaacatgaagaccaagtttatataactaggtatctgtataatgcaacaacattggaacacaataaagatgtatttttgtaaaaaaaaaaaaaaaaaaaaaaaaaaaaaaaaaaaaaaa

SEQ ID NO: 274 - DNA, 1760 bp, Homo sapiens
gagtcacgcgcctgggtgtcggcggggctgcgggaccgcgagtgagtgtggtcgctcctggttctgccagctcccctgagagcctgaacccgggcttgagagcctcgccaccccgggtgacatccctgccgtgggcttgggggctctgggtgtgattccgccggtccgggtcccgcagcgaccacctacccagcgcagtcaggggcggggctgggacccagagcgggaccccggctgccgagtccaggtgtcccgcgggcctcgatttggggagcagaaaacgccaggtcttcaagggtgtctgccaccaccatgcctgacccatttggcagcagcctcgtgtgtggtggtctggtgtggacggtggaagcgtgattctgctgagtgtcagtgtgaccactcgtgctcagccgtatctcagcaggaggacaggtgccggagcagctcgtgcagctaagcagccaactgcagaaacgtcaggcctgttgcagtctccaaggcaccatgaatgccatcgtggctctctgccacttctgcgagctccacggcccccgcactctcttctgcacggaggtgctgcacgccccacttcctcaaggggatgggaatgaggacagtcctggccagggtgagcaggcggaagaagaggaaggtggcattcagatgaacagtcggatgcgtgcgcacagccccgcagagggggccagcgtcgagtccagcagcccggggcccaaaaagtcggacatgtgcgagggctgccggtcacttgctgcagggcacccgggatatatcagccatgataaagagacctccattaaatacgtcagccaccagcaccccagccacccccagctcttcagcattgtccgccaggcctgtgtccggagcctgagctgtgaggtctgccctggccgtgaaggccccatcttcttcggagatgagcagcacggctttgtgttcagccacaccttcttcatcaaggacagcctggccaggggcttccagcgctggtacagcatcatcaccatcatgatggaccggatctacctcatcaactcctggcccttcctgctggggaaggtccggggaatcatcgatgagctccagggcaaggcgctcaaggtgtttgaggcagagcagtttggatgcccacagcgtgctcagaggatgaacacagccttcacgccattcctacaccagaggaacggcaacgccgcccgctcgctgacatcgctgacaagtgatgacaacctgtgggcgtgcctgcacacctcctttgcctggctcctgaaggcgtgtggcagccggctgaccgagaagctcctggaaggtgctccgaccgaggataccttggtccagatggagaagctcgctggtgaggcaggggtgctgttgccggggccttggcccggatggccgtggggcggtaccagctgtctgctctcctggcaggaatcgctgagggagggaaacgcggctctgaatcagcccagaacgagccttcgggaagctcaccctccgatctcggtgtgattgttgtgattgttgtgatttcctgtctcgtttgccttgaccgccatgtgaaagaatctgttccccagctaggtggggaaaattcacaggtgggctgtctgtagagagaactggctgattaaaggcttctcgtcccgattttgtgatagccaagtgcttggcctggtcgacggtctttgctcctttacaaataaagtgttctgtttcaaaaaaaaaaaaaaaaaaaa

SEQ ID NO: 275 - DNA, 3047 bp, Homo sapiens
tcttgcgtcaagacggccgtgctgagcgaatgcaggcgacttgcgagctgggagcgatttaaaacgctttggattcccccggcctgggtggggagagcgagctgggtgccccctagattccccgcccccgcacctcatgagccgaccctcggctccatggagcccggcaattatgccaccttggatggagccaaggatatcgaaggcttgctgggagcgggaggggggcggaatctggtcgcccactcccctctgaccagccacccagcggcgcctacgctgatgcctgctgtcaactatgcccccttggatctgccaggctcggcggagccgccaaagcaatgccacccatgccctggggtgccccaggggacgtccccagctcccgtgccttatggttactttggaggcgggtactactcctgccgagtgtcccggagctcgctgaaaccctgtgcccaggcagccaccctggccgcgtaccccgcggagactcccacggccggggaagagtaccccagccgccccactgagtttgccttctatccgggatatccgggaacctaccagcctatggccagttacctggacgtgtctgtggtgcagactctgggtgctcctggagaaccgcgacatgactccctgttgcctgtggacagttaccagtcttgggctctcgctggtggctggaacagccagatgtgttgccagggagaacagaacccaccaggtcccttttggaaggcagcatttgcagactccagcgggcagcaccctcctgacgcctgcgcctttcgtcgcggccgcaagaaacgcattccgtacagcaaggggcagttgcgggagctggagcgggagtatgcggctaacaagttcatcaccaaggacaagaggcgcaagatctcggcagccaccagcctctcggagcgccagattaccatctggtttcagaaccgccgggtcaaagagaagaaggttctcgccaaggtgaagaacagcgctaccccttaagagatctccttgcctgggtgggaggagcgaaagtgggggtgtcctggggagaccaggaacctgccaagcccaggctggggccaaggactctgctgagaggcccctagagacaacacccttcccaggccactggctgctggactgttcctcaggagcggcctgggtacccagtatgtgcagggagacggaaccccatgtgacagcccactccaccagggttcccaaagaacctggcccagtcataatcattcatcctgacagtggcaataatcacgataaccagtactagctgccatgatcgttagcctcatattttctatctagagctctgtagagcactttagaaaccgctttcatgaattgagctaattatgaataaatttggaaggcgatccctttgcagggaagctttctctcagacccccttccattacacctctcaccctggtaacagcaggaagactgaggagaggggaacgggcagattcgttgtgtggctgtgatgtccgtttagcatttttctcagctgacagctgggtaggtggacaattgtagaggctgtctcttcctccctccttgtccaccccatagggtgtacccactggtcttggaagcacccatccttaatacgatgatttttctgtcgtgtgaaaatgaagccagcaggctgcccctagtcagtccttccttccagagaaaaagagatttgagaaagtgcctgggtaattcaccattaatttcctcccccaaactctctgagtcttcccttaatatttctggtggttctgaccaaagcaggtcatggtttgttgagcatttgggatcccagtgaagtagatgtttgtagccttgcatacttagcccttcccaggcacaaacggagtggcagagtggtgccaaccctgttttcccagtccacgtagacagattcacagtgcggaattctggaagctggagacagacgggctctttgcagagccgggactctgagagggacatgagggcctctgcctctgtgttcattctctgatgtcctgtacctgggctcagtgcccggtgggactcatctcctggccgcgcagcaaagccagcgggttcgtgctggtccttcctgcaccttaggctgggggtggggggcctgccggcgcattctccacgattgagcgcacaggcctgaagtctggacaacccgcagaaccgaagctccgagcagcgggtcggtggcgagtagtggggtcggtggcgagcagttggtggtgggccgcggccgccactacctcgaggacatttccctcccggagccagctctcctagaaaccccgcggcggccgccgcagccaagtgtttatggcccgcggtcgggtgggatcctagccctgtctcctctcctgggaaggagtgagggtgggacgtgacttagacacctacaaatctatttaccaaagaggagcccgggactgagggaaaaggccaaagagtgtgagtgcatgcggactgggggttcaggggaagaggacgaggaggaggaagatgaggtcgatttcctgatttaaaaaatcgtccaagccccgtggtccagcttaaggtcctcggttacatgcgccgctcagagcaggtcactttctgccttccacgtcctccttcaaggaagccccatgtgggtagctttcaatatcgcaggttcttactcctctgcctctataagctcaaacccaccaacgatcgggcaagtaaaccccctccctcgccgacttcggaactggcgagagttcagcgcagatgggcctgtggggagggggcaagatagatgagggggagcggcatggtgcggggtgaccccttggagagaggaaaaaggccacaagaggggctgccaccgccactaacggagatggccctggtagagacctttgggggtctggaacctctggactccccatgctctaactcccacactctgctatcagaaacttaaacttgaggattttctctgtttttcactcgcaataaattcagagcaaacaaaaaaaaaaaaa

SEQ ID NO: 276 - DNA, 1500 bp, Homo sapiens
ttgctgtccctgagtctcatctctccctctccccgtccctccctcaagtcctgtgggtctccgtccctccgtatgtctttacttaaagggaaatccagacccttccacaggccactctagaggctccatttccccttcaggtccggaagtggagtgtcctgggttccatccagatcgcatgtcttctacgtctacgttcgtgtctcccgcctcttccctcagcctcacccgaatcagggcctccagagcattctgggcagtagcgagtccctgggtaaggggcgtccagggcacctccctggggcccggagcagctcattccaggacatctgggacaggaagggtaccgggaatgaactggggtgctagtacccaggacccaaagccaggggctgccagaaatacctattaacccccatttcccagcctcctcttacacaggcgcattcccgggttctcctctgaggccgggagcggcctcccagccccacccccgactccccttcccccccaggagatggacactttatagagagagctttttattctctcgttaaacctgtcaaagcgcaggagacagaaagctagggagggagaggaggagaaggaggtggggcccggctcctcgtcccctcttcctccgcccaccacgcctcccctccccccggacgtgtaaatgagactctgcaaactggaaagcagcgaaaggacacctccttccttttctctcttgttgtttttaagtggaatgagagagagaggagtggagagggaaaagaagagagagagggagaagagagagaggagagaaagagcgagagagcgagagagagagacagagacagagagagagagagagagagagagagagagaaagagagagagagagagagagaataagctggggtaaagtattttcgcagtttctgcctttaggattttattagcttctctcccccaggccgcagccaatcagcgcgcgtgcccgggcccctgcgtctcttgcgtcaagacggccgtgctgagcgaatgcaggcgacttgcgagctgggagcgatttaaaacgctttggattcccccggcctgggtggggagagcgagctgggtgccccctagattccccgcccccgcacctcatgagccgaccctcggctccatggagcccggcaattatgccaccttggatggagccaaggatatcgaaggcttgctgggagcgggaggggggcggaatctggtcgcccactcccctctgaccagccacccagcggcgcctacgctgatgcctgctgtcaactatgcccccttggatctgccaggctcggcggagccgccaaagcaatgccacccatgccctggggtgccccaggggacgtccccagctcccgtgccttatggttactttggaggcgggtactactcctgccgagtgtcccggagctcgctgaaaccctgtgcccaggcagccaccctggccgcgtaccccgcggagactcccac

SEQ ID NO: 277 - DNA, 1757 bp, Homo sapiens
cccttcccccccaggagatggacactttatagagagagctttttattctctcgttaaacctgtcaaagcgcaggagacagaaagctagggagggagaggaggagaaggaggtggggcccggctcctcgtcccctcttcctccgcccaccacgcctcccctccccccggacgtgtaaatgagactctgcaaactggaaagcagcgaaaggacacctccttccttttctctcttgttgtttttaagtggaatgagagagagaggagtggagagggaaaagaagagagagagggagaagagagagaggagagaaagagcgagagagcgagagagagagacagagacagagagagagagagagagagagagagagagaaagagagagagagagagagagaataagctggggtaaagtattttcgcagtttctgcctttaggattttattagcttctctcccccaggccgcagccaatcagcgcgcgtgcccgggcccctgcgtctcttgcgtcaagacggccgtgctgagcgaatgcaggcgacttgcgagctgggagcgatttaaaacgctttggattcccccggcctgggtggggagagcgagctgggtgccccctagattccccgcccccgcacctcatgagccgaccctcggctccatggagcccggcaattatgccaccttggatggagccaaggatatcgaaggcttgctgggagcgggaggggggcggaatctggtcgcccactcccctctgaccagccacccagcggcgcctacgctgatgcctgctgtcaactatgcccccttggatctgccaggctcggcggagccgccaaagcaatgccacccatgccctggggtgccccaggggacgtccccagctcccgtgccttatggttactttggaggcgggtactactcctgccgagtgtcccggagctcgctgaaaccctgtgcccaggcagccaccctggccgcgtaccccgcggagactcccacggccggggaagagtaccccagccgccccactgagtttgccttctatccgggatatccgggaacctaccagcctatggccagttacctggacgtgtctgtggtgcagactctgggtgctcctggagaaccgcgacatgactccctgttgcctgtggacagttaccagtcttgggctctcgctggtggctggaacagccagatgtgttgccagggagaacagaacccaccaggtcccttttggaaggcagcatttgcaggtacctctattaccctgggtccccttgtctctgagcctggggttgtgggtcccaatggcatttccctgggaggaggaggagggagacttggagctggtgaggatgagcttggtgctcctcccttggttattaggactctgaaggaggtctgagtagctggagggcctggatggaggtcagtgtgaggggcctgagctgggtgctatctgaagcctgaaggccacctcacttctccaggaggccctgggaccagcctttcaacatgtctgagaggtttagatctctttgctgttgagtggggatcagggtgtccctacccagcacaattccaaactaattctacacaaaagctaaataactctcaattcggtgcgtggggagtgggtgtgggagatgggtaaaaaggtattggatgtactgtagagaatacaacctctcactttctattagatgagttttccaatttccaaagaaaaatttaggtttcctgcagccgtgac

SEQ ID NO: 278 - DNA, 3279 bp, Homo sapiens
gatgagttttccaatttccaaagaaaaatttaggtttcctgcagccgtgacatatgtgtgtgcactgggatgggttaatgtgtgtgtgtgtgtgtgtatgcgcatgtattgggagtgggggcagaaacgtgtttccagaatttgcctgtagaatctaaaagagtggccaagagtctggaaatgcatgaagactggacgtatgtgatggtgggcaaaggcctgactgtgtgtggtgtgtgggtatgtttgcagattcgcgggtgtgagagcagtgatgggtgagggtggccttcaggagccaaggctgagcggtggtgagagaacaagccggaagccagggtgctgtcctggtatgctttggaggaacaggattgcacgtgcgcctgtagggtgacctgtgtgcacctgtgagatgacttagcttggggcttgcaaggcctgggtctgcatgggtgggtatctgaccatgccttttcctccctccctttcacgccgcgcagactccagcgggcagcaccctcctgacgcctgcgcctttcgtcgcggccgcaagaaacgcattccgtacagcaaggggcagttgcgggagctggagcgggagtatgcggctaacaagttcatcaccaaggacaagaggcgcaagatctcggcagccaccagcctctcggagcgccagattaccatctggtttcagaaccgccgggtcaaagagaagaaggttctcgccaaggtgaagaacagcgctaccccttaagagatctccttgcctgggtgggaggagcgaaagtgggggtgtcctggggagaccaggaacctgccaagcccaggctggggccaaggactctgctgagaggcccctagagacaacacccttcccaggccactggctgctggactgttcctcaggagcggcctgggtacccagtatgtgcagggagacggaaccccatgtgacagcccactccaccagggttcccaaagaacctggcccagtcataatcattcatcctgacagtggcaataatcacgataaccagtactagctgccatgatcgttagcctcatattttctatctagagctctgtagagcactttagaaaccgctttcatgaattgagctaattatgaataaatttggaaggcgatccctttgcagggaagctttctctcagacccccttccattacacctctcaccctggtaacagcaggaagactgaggagaggggaacgggcagattcgttgtgtggctgtgatgtccgtttagcatttttctcagctgacagctgggtaggtggacaattgtagaggctgtctcttcctccctccttgtccaccccatagggtgtacccactggtcttggaagcacccatccttaatacgatgatttttctgtcgtgtgaaaatgaagccagcaggctgcccctagtcagtccttccttccagagaaaaagagatttgagaaagtgcctgggtaattcaccattaatttcctcccccaaactctctgagtcttcccttaatatttctggtggttctgaccaaagcaggtcatggtttgttgagcatttgggatcccagtgaagtagatgtttgtagccttgcatacttagcccttcccaggcacaaacggagtggcagagtggtgccaaccctgttttcccagtccacgtagacagattcacagtgcggaattctggaagctggagacagacgggctctttgcagagccgggactctgagagggacatgagggcctctgcctctgtgttcattctctgatgtcctgtacctgggctcagtgcccggtgggactcatctcctggccgcgcagcaaagccagcgggttcgtgctggtccttcctgcaccttaggctgggggtggggggcctgccggcgcattctccacgattgagcgcacaggcctgaagtctggacaacccgcagaaccgaagctccgagcagcgggtcggtggcgagtagtggggtcggtggcgagcagttggtggtgggccgcggccgccactacctcgaggacatttccctcccggagccagctctcctagaaaccccgcggcggccgccgcagccaagtgtttatggcccgcggtcgggtgggatcctagccctgtctcctctcctgggaaggagtgagggtgggacgtgacttagacacctacaaatctatttaccaaagaggagcccgggactgagggaaaaggccaaagagtgtgagtgcatgcggactgggggttcaggggaagaggacgaggaggaggaagatgaggtcgatttcctgatttaaaaaatcgtccaagccccgtggtccagcttaaggtcctcggttacatgcgccgctcagagcaggtcactttctgccttccacgtcctccttcaaggaagccccatgtgggtagctttcaatatcgcaggttcttactcctctgcctctataagctcaaacccaccaacgatcgggcaagtaaaccccctccctcgccgacttcggaactggcgagagttcagcgcagatgggcctgtggggagggggcaagatagatgagggggagcggcatggtgcggggtgaccccttggagagaggaaaaaggccacaagaggggctgccaccgccactaacggagatggccctggtagagacctttgggggtctggaacctctggactccccatgctctaactcccacactctgctatcagaaacttaaacttgaggattttctctgtttttcactcgcaataaattcagagcaaacaaaagatgtggaatcttagagatttattccactggtgtgttaggaccattaaaaagacgtgggcgcccccttccgacagaggctcaccactccaggagaacctgcgggcaggctttcatcgtccgcggagctacaggcttccagcggcctggggcctcgtgggtactgagctgcgtgtgggggtccaggacccgatgtcgcctgccattcggccagggcatcggcagatgtattggtccagcccccgagagacccaggaagaaggcaaggaggttcggtacgagccatctcgaatggaagaagaaggcggtcggtctgcgggagccaggccgcagagccatccgccttctgtccatgtcttctttatcttcctcgccataataattagtggtgtggacccccccacacacactttttttcggatttacttgtatggaacctgtgcaaaaaatatttaatttcgttttgtattaaacgctttcattgggaatcccttcccaat

SEQ ID NO: 279 - DNA, 1500 bp, Homo sapiens
ggaagatgaggtcgatttcctgatttaaaaaatcgtccaagccccgtggtccagcttaaggtcctcggttacatgcgccgctcagagcaggtcactttctgccttccacgtcctccttcaaggaagccccatgtgggtagctttcaatatcgcaggttcttactcctctgcctctataagctcaaacccaccaacgatcgggcaagtaaaccccctccctcgccgacttcggaactggcgagagttcagcgcagatgggcctgtggggagggggcaagatagatgagggggagcggcatggtgcggggtgaccccttggagagaggaaaaaggccacaagaggggctgccaccgccactaacggagatggccctggtagagacctttgggggtctggaacctctggactccccatgctctaactcccacactctgctatcagaaacttaaacttgaggattttctctgtttttcactcgcaataaattcagagcaaacaaaagatgtggaatcttagagatttattccactggtgtgttaggaccattaaaaagacgtgggcgcccccttccgacagaggctcaccactccaggagaacctgcgggcaggctttcatcgtccgcggagctacaggcttccagcggcctggggcctcgtgggtactgagctgcgtgtgggggtccaggacccgatgtcgcctgccattcggccagggcatcggcagatgtattggtccagcccccgagagacccaggaagaaggcaaggaggttcggtacgagccatctcgaatggaagaagaaggcggtcggtctgcgggagccaggccgcagagccatccgccttctgtccatgtcttctttatcttcctcgccataataattagtggtgtggacccccccacacacactttttttcggatttacttgtatggaacctgtgcaaaaaatatttaatttcgttttgtattaaacgctttcattgggaatcccttcccaattttagtctcccacctatccctggacgaccacattgaaatctctcacttatttgtgtttaaatcacaacaaaatctacaaacctatattcgcctgcagatatttatttttacataagggctatgttaagctacaggaggaaatgttttgcttaccattcggacaaacgtgtgaacacaatgtcacaataggtgaatccagacaatgagctcacagacgaataaacgcagaggcacacacatatactccggaaaataagcagggcgccttttcactaacaaggcgcaattgtaccctgagctgccctccagaccgttcccctccctcagagccaaactcccgcagcgaatctctcagcaagctacgaaatgggatcacagggtcgcgtctacgcgggctccaggcccgaaataatttctaactccaaagcaagtggattttattaggcctccagaagccgaataagggagtagtggcgcaatgcgtagaaactacctccgga

SEQ ID NO: 280 - DNA, 5436 bp, Homo sapiens
ggccgcggcggcggaggcagcagcggcggcggcagtggcggcggcgaaggtggcggcggctcggccagtactcccggcccccgccatttcggactgggagcgagcgcggcgcaggcactgaaggcggcggcggggccagaggctcagcggctcccaggtgcgggagagaggcctgctgaaaatgactgaatataaacttgtggtagttggagctggtggcgtaggcaagagtgccttgacgatacagctaattcagaatcattttgtggacgaatatgatccaacaatagaggattcctacaggaagcaagtagtaattgatggagaaacctgtctcttggatattctcgacacagcaggtcaagaggagtacagtgcaatgagggaccagtacatgaggactggggagggctttctttgtgtatttgccataaataatactaaatcatttgaagatattcaccattatagagaacaaattaaaagagttaaggactctgaagatgtacctatggtcctagtaggaaataaatgtgatttgccttctagaacagtagacacaaaacaggctcaggacttagcaagaagttatggaattccttttattgaaacatcagcaaagacaagacagagagtggaggatgctttttatacattggtgagggagatccgacaatacagattgaaaaaaatcagcaaagaagaaaagactcctggctgtgtgaaaattaaaaaatgcattataatgtaatctgggtgttgatgatgccttctatacattagttcgagaaattcgaaaacataaagaaaagatgagcaaagatggtaaaaagaagaaaaagaagtcaaagacaaagtgtgtaattatgtaaatacaatttgtacttttttcttaaggcatactagtacaagtggtaatttttgtacattacactaaattattagcatttgttttagcattacctaatttttttcctgctccatgcagactgttagcttttaccttaaatgcttattttaaaatgacagtggaagtttttttttcctctaagtgccagtattcccagagttttggtttttgaactagcaatgcctgtgaaaaagaaactgaatacctaagatttctgtcttggggtttttggtgcatgcagttgattacttcttatttttcttaccaattgtgaatgttggtgtgaaacaaattaatgaagcttttgaatcatccctattctgtgttttatctagtcacataaatggattaattactaatttcagttgagaccttctaattggtttttactgaaacattgagggaacacaaatttatgggcttcctgatgatgattcttctaggcatcatgtcctatagtttgtcatccctgatgaatgtaaagttacactgttcacaaaggttttgtctcctttccactgctattagtcatggtcactctccccaaaatattatattttttctataaaaagaaaaaaatggaaaaaaattacaaggcaatggaaactattataaggccatttccttttcacattagataaattactataaagactcctaatagcttttcctgttaaggcagacccagtatgaaatggggattattatagcaaccattttggggctatatttacatgctactaaatttttataataattgaaaagattttaacaagtataaaaaattctcataggaattaaatgtagtctccctgtgtcagactgctctttcatagtataactttaaatcttttcttcaacttgagtctttgaagatagttttaattctgcttgtgacattaaaagattatttgggccagttatagcttattaggtgttgaagagaccaaggttgcaaggccaggccctgtgtgaacctttgagctttcatagagagtttcacagcatggactgtgtccccacggtcatccagtgttgtcatgcattggttagtcaaaatggggagggactagggcagtttggatagctcaacaagatacaatctcactctgtggtggtcctgctgacaaatcaagagcattgcttttgtttcttaagaaaacaaactcttttttaaaaattacttttaaatattaactcaaaagttgagattttggggtggtggtgtgccaagacattaattttttttttaaacaatgaagtgaaaaagttttacaatctctaggtttggctagttctcttaacactggttaaattaacattgcataaacacttttcaagtctgatccatatttaataatgctttaaaataaaaataaaaacaatccttttgataaatttaaaatgttacttattttaaaataaatgaagtgagatggcatggtgaggtgaaagtatcactggactaggaagaaggtgacttaggttctagataggtgtcttttaggactctgattttgaggacatcacttactatccatttcttcatgttaaaagaagtcatctcaaactcttagttttttttttttacaactatgtaatttatattccatttacataaggatacacttatttgtcaagctcagcacaatctgtaaatttttaacctatgttacaccatcttcagtgccagtcttgggcaaaattgtgcaagaggtgaagtttatatttgaatatccattctcgttttaggactcttcttccatattagtgtcatcttgcctccctaccttccacatgccccatgacttgatgcagttttaatacttgtaattcccctaaccataagatttactgctgctgtggatatctccatgaagttttcccactgagtcacatcagaaatgccctacatcttatttcctcagggctcaagagaatctgacagataccataaagggatttgacctaatcactaattttcaggtggtggctgatgctttgaacatctctttgctgcccaatccattagcgacagtaggatttttcaaacctggtatgaatagacagaaccctatccagtggaaggagaatttaataaagatagtgctgaaagaattccttaggtaatctataactaggactactcctggtaacagtaatacattccattgttttagtaaccagaaatcttcatgcaatgaaaaatactttaattcatgaagcttactttttttttttggtgtcagagtctcgctcttgtcacccaggctggaatgcagtggcgccatctcagctcactgcaacctccatctcccaggttcaagcgattctcgtgcctcggcctcctgagtagctgggattacaggcgtgtgccactacactcaactaatttttgtatttttaggagagacggggtttcaccctgttggccaggctggtctcgaactcctgacctcaagtgattcacccaccttggcctcataaacctgttttgcagaactcatttattcagcaaatatttattgagtgcctaccagatgccagtcaccgcacaaggcactgggtatatggtatccccaaacaagagacataatcccggtccttaggtagtgctagtgtggtctgtaatatcttactaaggcctttggtatacgacccagagataacacgatgcgtattttagttttgcaaagaaggggtttggtctctgtgccagctctataattgttttgctacgattccactgaaactcttcgatcaagctactttatgtaaatcacttcattgttttaaaggaataaacttgattatattgtttttttatttggcataactgtgattcttttaggacaattactgtacacattaaggtgtatgtcagatattcatattgacccaaatgtgtaatattccagttttctctgcataagtaattaaaatatacttaaaaattaatagttttatctgggtacaaataaacaggtgcctgaactagttcacagacaaggaaacttctatgtaaaaatcactatgatttctgaattgctatgtgaaactacagatctttggaacactgtttaggtagggtgttaagacttacacagtacctcgtttctacacagagaaagaaatggccatacttcaggaactgcagtgcttatgaggggatatttaggcctcttgaatttttgatgtagatgggcatttttttaaggtagtggttaattacctttatgtgaactttgaatggtttaacaaaagatttgtttttgtagagattttaaagggggagaattctagaaataaatgttacctaattattacagccttaaagacaaaaatccttgttgaagtttttttaaaaaaagctaaattacatagacttaggcattaacatgtttgtggaagaatatagcagacgtatattgtatcatttgagtgaatgttcccaagtaggcattctaggctctatttaactgagtcacactgcataggaatttagaacctaacttttataggttatcaaaactgttgtcaccattgcacaattttgtcctaatatatacatagaaactttgtggggcatgttaagttacagtttgcacaagttcatctcatttgtattccattgattttttttttcttctaaacattttttcttcaaacagtatataactttttttaggggatttttttttagacagcaaaaactatctgaagatttccatttgtcaaaaagtaatgatttcttgataattgtgtagtaatgttttttagaacccagcagttaccttaaagctgaatttatatttagtaacttctgtgttaatactggatagcatgaattctgcattgagaaactgaatagctgtcataaaatgaaactttctttctaaagaaagatactcacatgagttcttgaagaatagtcataactagattaagatctgtgttttagtttaatagtttgaagtgcctgtttgggataatgataggtaatttagatgaatttaggggaaaaaaaagttatctgcagatatgttgagggcccatctctccccccacacccccacagagctaactgggttacagtgttttatccgaaagtttccaattccactgtcttgtgttttcatgttgaaaatacttttgcatttttcctttgagtgccaatttcttactagtactatttcttaatgtaacatgtttacctggaatgtattttaactatttttgtatagtgtaaactgaaacatgcacattttgtacattgtgctttcttttgtgggacatatgcagtgtgatccagttgttttccatcatttggttgcgctgacctaggaatgttggtcatatcaaacattaaaaatgaccactcttttaattgaaattaacttttaaatgtttataggagtatgtgctgtgaagtgatctaaaatttgtaatatttttgtcatgaactgtactactcctaattattgtaatgtaataaaaatagttacagtgacaaaaaaaaaaaaaaa

SEQ ID NO: 281 - DNA, 5312 bp, Homo sapiens
ggccgcggcggcggaggcagcagcggcggcggcagtggcggcggcgaaggtggcggcggctcggccagtactcccggcccccgccatttcggactgggagcgagcgcggcgcaggcactgaaggcggcggcggggccagaggctcagcggctcccaggtgcgggagagaggcctgctgaaaatgactgaatataaacttgtggtagttggagctggtggcgtaggcaagagtgccttgacgatacagctaattcagaatcattttgtggacgaatatgatccaacaatagaggattcctacaggaagcaagtagtaattgatggagaaacctgtctcttggatattctcgacacagcaggtcaagaggagtacagtgcaatgagggaccagtacatgaggactggggagggctttctttgtgtatttgccataaataatactaaatcatttgaagatattcaccattatagagaacaaattaaaagagttaaggactctgaagatgtacctatggtcctagtaggaaataaatgtgatttgccttctagaacagtagacacaaaacaggctcaggacttagcaagaagttatggaattccttttattgaaacatcagcaaagacaagacagggtgttgatgatgccttctatacattagttcgagaaattcgaaaacataaagaaaagatgagcaaagatggtaaaaagaagaaaaagaagtcaaagacaaagtgtgtaattatgtaaatacaatttgtacttttttcttaaggcatactagtacaagtggtaatttttgtacattacactaaattattagcatttgttttagcattacctaatttttttcctgctccatgcagactgttagcttttaccttaaatgcttattttaaaatgacagtggaagtttttttttcctctaagtgccagtattcccagagttttggtttttgaactagcaatgcctgtgaaaaagaaactgaatacctaagatttctgtcttggggtttttggtgcatgcagttgattacttcttatttttcttaccaattgtgaatgttggtgtgaaacaaattaatgaagcttttgaatcatccctattctgtgttttatctagtcacataaatggattaattactaatttcagttgagaccttctaattggtttttactgaaacattgagggaacacaaatttatgggcttcctgatgatgattcttctaggcatcatgtcctatagtttgtcatccctgatgaatgtaaagttacactgttcacaaaggttttgtctcctttccactgctattagtcatggtcactctccccaaaatattatattttttctataaaaagaaaaaaatggaaaaaaattacaaggcaatggaaactattataaggccatttccttttcacattagataaattactataaagactcctaatagcttttcctgttaaggcagacccagtatgaaatggggattattatagcaaccattttggggctatatttacatgctactaaatttttataataattgaaaagattttaacaagtataaaaaattctcataggaattaaatgtagtctccctgtgtcagactgctctttcatagtataactttaaatcttttcttcaacttgagtctttgaagatagttttaattctgcttgtgacattaaaagattatttgggccagttatagcttattaggtgttgaagagaccaaggttgcaaggccaggccctgtgtgaacctttgagctttcatagagagtttcacagcatggactgtgtccccacggtcatccagtgttgtcatgcattggttagtcaaaatggggagggactagggcagtttggatagctcaacaagatacaatctcactctgtggtggtcctgctgacaaatcaagagcattgcttttgtttcttaagaaaacaaactcttttttaaaaattacttttaaatattaactcaaaagttgagattttggggtggtggtgtgccaagacattaattttttttttaaacaatgaagtgaaaaagttttacaatctctaggtttggctagttctcttaacactggttaaattaacattgcataaacacttttcaagtctgatccatatttaataatgctttaaaataaaaataaaaacaatccttttgataaatttaaaatgttacttattttaaaataaatgaagtgagatggcatggtgaggtgaaagtatcactggactaggaagaaggtgacttaggttctagataggtgtcttttaggactctgattttgaggacatcacttactatccatttcttcatgttaaaagaagtcatctcaaactcttagttttttttttttacaactatgtaatttatattccatttacataaggatacacttatttgtcaagctcagcacaatctgtaaatttttaacctatgttacaccatcttcagtgccagtcttgggcaaaattgtgcaagaggtgaagtttatatttgaatatccattctcgttttaggactcttcttccatattagtgtcatcttgcctccctaccttccacatgccccatgacttgatgcagttttaatacttgtaattcccctaaccataagatttactgctgctgtggatatctccatgaagttttcccactgagtcacatcagaaatgccctacatcttatttcctcagggctcaagagaatctgacagataccataaagggatttgacctaatcactaattttcaggtggtggctgatgctttgaacatctctttgctgcccaatccattagcgacagtaggatttttcaaacctggtatgaatagacagaaccctatccagtggaaggagaatttaataaagatagtgctgaaagaattccttaggtaatctataactaggactactcctggtaacagtaatacattccattgttttagtaaccagaaatcttcatgcaatgaaaaatactttaattcatgaagcttactttttttttttggtgtcagagtctcgctcttgtcacccaggctggaatgcagtggcgccatctcagctcactgcaacctccatctcccaggttcaagcgattctcgtgcctcggcctcctgagtagctgggattacaggcgtgtgccactacactcaactaatttttgtatttttaggagagacggggtttcaccctgttggccaggctggtctcgaactcctgacctcaagtgattcacccaccttggcctcataaacctgttttgcagaactcatttattcagcaaatatttattgagtgcctaccagatgccagtcaccgcacaaggcactgggtatatggtatccccaaacaagagacataatcccggtccttaggtagtgctagtgtggtctgtaatatcttactaaggcctttggtatacgacccagagataacacgatgcgtattttagttttgcaaagaaggggtttggtctctgtgccagctctataattgttttgctacgattccactgaaactcttcgatcaagctactttatgtaaatcacttcattgttttaaaggaataaacttgattatattgtttttttatttggcataactgtgattcttttaggacaattactgtacacattaaggtgtatgtcagatattcatattgacccaaatgtgtaatattccagttttctctgcataagtaattaaaatatacttaaaaattaatagttttatctgggtacaaataaacaggtgcctgaactagttcacagacaaggaaacttctatgtaaaaatcactatgatttctgaattgctatgtgaaactacagatctttggaacactgtttaggtagggtgttaagacttacacagtacctcgtttctacacagagaaagaaatggccatacttcaggaactgcagtgcttatgaggggatatttaggcctcttgaatttttgatgtagatgggcatttttttaaggtagtggttaattacctttatgtgaactttgaatggtttaacaaaagatttgtttttgtagagattttaaagggggagaattctagaaataaatgttacctaattattacagccttaaagacaaaaatccttgttgaagtttttttaaaaaaagctaaattacatagacttaggcattaacatgtttgtggaagaatatagcagacgtatattgtatcatttgagtgaatgttcccaagtaggcattctaggctctatttaactgagtcacactgcataggaatttagaacctaacttttataggttatcaaaactgttgtcaccattgcacaattttgtcctaatatatacatagaaactttgtggggcatgttaagttacagtttgcacaagttcatctcatttgtattccattgattttttttttcttctaaacattttttcttcaaacagtatataactttttttaggggatttttttttagacagcaaaaactatctgaagatttccatttgtcaaaaagtaatgatttcttgataattgtgtagtaatgttttttagaacccagcagttaccttaaagctgaatttatatttagtaacttctgtgttaatactggatagcatgaattctgcattgagaaactgaatagctgtcataaaatgaaactttctttctaaagaaagatactcacatgagttcttgaagaatagtcataactagattaagatctgtgttttagtttaatagtttgaagtgcctgtttgggataatgataggtaatttagatgaatttaggggaaaaaaaagttatctgcagatatgttgagggcccatctctccccccacacccccacagagctaactgggttacagtgttttatccgaaagtttccaattccactgtcttgtgttttcatgttgaaaatacttttgcatttttcctttgagtgccaatttcttactagtactatttcttaatgtaacatgtttacctggaatgtattttaactatttttgtatagtgtaaactgaaacatgcacattttgtacattgtgctttcttttgtgggacatatgcagtgtgatccagttgttttccatcatttggttgcgctgacctaggaatgttggtcatatcaaacattaaaaatgaccactcttttaattgaaattaacttttaaatgtttataggagtatgtgctgtgaagtgatctaaaatttgtaatatttttgtcatgaactgtactactcctaattattgtaatgtaataaaaatagttacagtgacaaaaaaaaaaaaaaa

SEQ ID NO: 282 - DNA, 2785 bp, Homo sapiens
ggtgtccggagccgcggacctagagatcccagaagccacagcgcagcggcccggcccgccactatttccaggctcagcggggcaggggccgccgcccaccgcccgccgccatggggctgaaggccgcccagaagacgctgttcccgctgcgctccatcgacgacgtggtgcgcctgtttgctgccgagctgggccgagaggagccggacctggtgctcctttccttggtgctgggcttcgtggagcattttctggctgtcaaccgcgtcatccctaccaacgttcccgagctcaccttccagcccagccccgcccccgacccgcctggcggcctcacctactttcccgtggccgacctgtctatcatcgccgccctctatgcccgcttcaccgcccagatccgaggcgccgtcgacctgtccctctatcctcgagaagggggtgtctccagccgtgagctggtgaagaaggtctccgatgtcatatggaacagcctcagccgctcctacttcaaggatcgggcccacatccagtccctcttcagcttcatcacaggttggagcccagtaggcaccaaattggacagctccggtgtggcctttgctgtggttggggcctgccaggccctgggtctccgggatgtccacctcgccctgtctgaggatcatgcctgggtagtgtttgggcccaatggggagcagacagctgaggtcacctggcacggcaagggcaacgaggaccgcaggggccagacagtcaatgccggtgtggctgagcggagctggctgtacctgaaaggatcatacatgcgctgtgaccgcaagatggaggtggcgttcatggtgtgtgccatcaacccttccattgacctgcacaccgactcgctggagcttctgcagctgcagcagaagctgctctggctgctctatgacctgggacatctggaaaggtaccccatggccttagggaacctggcagatctagaggagctggagcccacccctggccggccagacccactcaccctctaccacaagggcattgcctcagccaagacctactatcgggatgaacacatctacccctacatgtacctggctggctaccactgtcgcaaccgcaatgtgcgggaagccctgcaggcctgggcggacacggccactgtcatccaggactacaactactgccgggaagacgaggagatctacaaggagttctttgaagtagccaatgatgtcatccccaacctgctgaaggaggcagccagcttgctggaggcgggcgaggagcggccgggggagcaaagccagggcacccagagccaaggttccgccctccaggaccctgagtgcttcgcccacctgctgcgattctacgacggcatctgcaaatgggaggagggcagtcccacgcctgtgctgcacgtgggctgggccacctttcttgtgcagtccctaggccgttttgagggacaggtgcggcagaaggtgcgcatagtgagccgagaggccgaggcggccgaggccgaggagccgtggggcgaggaagcccgggaaggccggcggcggggcccacggcgggagtccaagccagaggagcccccgccgcccaagaagccagcactggacaagggcctgggcaccggccagggtgcagtgtcaggacccccccggaagcctcctgggactgtcgctggcacagcccgaggccctgaaggtggcagcacggctcaggtgccagcacccgcagcatcaccaccgccggagggtccagtgctcactttccagagtgagaagatgaagggcatgaaggagctgctggtggccaccaagatcaactcgagcgccatcaagctgcaactcacggcacagtcgcaagtgcagatgaagaagcagaaagtgtccacccctagtgactacactctgtctttcctcaagcggcagcgcaaaggcctctgaactactggggacttcggaccgcttgtggggacccaggctccgcccttagtcccccaactctgagcccatgttctgcccccagcccaaaggggacaggcctcacctctacccaaaccctaggttcccggtcccgagtacagtctgtatcaaacccacgattttctccagctcagaacccagggctctgccccagtcgttagaatataggtctcttctcccagaatcccagccggccaatggaaacctcacgctgggtcctaattaccagtctttaaaggcccagcccctagaaacccaagctcctcctcggaaccgctcacctagagccagaccaacgttactcagggctcctcccagcttgtaggagctgaggtttcacccttaacccaaggagcacaggtcccacctccagcccgggagcctaggaccactcagcccctaggagtatatttccgcacttcagaattccatatcttgcgaatccaagctccctgccccaaataacttcagtcctgctccagaatttggaaatcctagtttcctctccttcgtatcccgagtctgggacacaaaactccgcccccagcctatgagcatcctgagccccgccctcttcctgacgaaactggccccggatcagagcaggacctcccttccgaccctctgggaacctcccagaggtccagcccatctcggagcatcccggaggaaatctgcagagggttaggagtgggtgacaagagcctgatctcttcctgttttgtacatagatttatttttcagttccaagaaagatgaatacattttgttaaaaaaaataaaaaaaa

SEQ ID NO: 283 - DNA, 2770 bp, Homo sapiens
ggtgtccggagccgcggacctagagatcccagaagccacagcgcagcggcccggcccgccactatttccaggctcagcggggcaggggccgccgcccaccgcccgccgccatggggctgaaggccgcccagaagacgctgttcccgctgcgctccatcgacgacgtggtgcgcctgtttgctgccgagctgggccgagaggagccggacctggtgctcctttccttggtgctgggcttcgtggagcattttctggctgtcaaccgcgtcatccctaccaacgttcccgagctcaccttccagcccagccccgcccccgacccgcctggcggcctcacctactttcccgtggccgacctgtctatcatcgccgccctctatgcccgcttcaccgcccagatccgaggcgccgtcgacctgtccctctatcctcgagaagggggtgtctccagccgtgagctggtgaagaaggtctccgatgtcatatggaacagcctcagccgctcctacttcaaggatcgggcccacatccagtccctcttcagcttcatcacaggcaccaaattggacagctccggtgtggcctttgctgtggttggggcctgccaggccctgggtctccgggatgtccacctcgccctgtctgaggatcatgcctgggtagtgtttgggcccaatggggagcagacagctgaggtcacctggcacggcaagggcaacgaggaccgcaggggccagacagtcaatgccggtgtggctgagcggagctggctgtacctgaaaggatcatacatgcgctgtgaccgcaagatggaggtggcgttcatggtgtgtgccatcaacccttccattgacctgcacaccgactcgctggagcttctgcagctgcagcagaagctgctctggctgctctatgacctgggacatctggaaaggtaccccatggccttagggaacctggcagatctagaggagctggagcccacccctggccggccagacccactcaccctctaccacaagggcattgcctcagccaagacctactatcgggatgaacacatctacccctacatgtacctggctggctaccactgtcgcaaccgcaatgtgcgggaagccctgcaggcctgggcggacacggccactgtcatccaggactacaactactgccgggaagacgaggagatctacaaggagttctttgaagtagccaatgatgtcatccccaacctgctgaaggaggcagccagcttgctggaggcgggcgaggagcggccgggggagcaaagccagggcacccagagccaaggttccgccctccaggaccctgagtgcttcgcccacctgctgcgattctacgacggcatctgcaaatgggaggagggcagtcccacgcctgtgctgcacgtgggctgggccacctttcttgtgcagtccctaggccgttttgagggacaggtgcggcagaaggtgcgcatagtgagccgagaggccgaggcggccgaggccgaggagccgtggggcgaggaagcccgggaaggccggcggcggggcccacggcgggagtccaagccagaggagcccccgccgcccaagaagccagcactggacaagggcctgggcaccggccagggtgcagtgtcaggacccccccggaagcctcctgggactgtcgctggcacagcccgaggccctgaaggtggcagcacggctcaggtgccagcacccgcagcatcaccaccgccggagggtccagtgctcactttccagagtgagaagatgaagggcatgaaggagctgctggtggccaccaagatcaactcgagcgccatcaagctgcaactcacggcacagtcgcaagtgcagatgaagaagcagaaagtgtccacccctagtgactacactctgtctttcctcaagcggcagcgcaaaggcctctgaactactggggacttcggaccgcttgtggggacccaggctccgcccttagtcccccaactctgagcccatgttctgcccccagcccaaaggggacaggcctcacctctacccaaaccctaggttcccggtcccgagtacagtctgtatcaaacccacgattttctccagctcagaacccagggctctgccccagtcgttagaatataggtctcttctcccagaatcccagccggccaatggaaacctcacgctgggtcctaattaccagtctttaaaggcccagcccctagaaacccaagctcctcctcggaaccgctcacctagagccagaccaacgttactcagggctcctcccagcttgtaggagctgaggtttcacccttaacccaaggagcacaggtcccacctccagcccgggagcctaggaccactcagcccctaggagtatatttccgcacttcagaattccatatcttgcgaatccaagctccctgccccaaataacttcagtcctgctccagaatttggaaatcctagtttcctctccttcgtatcccgagtctgggacacaaaactccgcccccagcctatgagcatcctgagccccgccctcttcctgacgaaactggccccggatcagagcaggacctcccttccgaccctctgggaacctcccagaggtccagcccatctcggagcatcccggaggaaatctgcagagggttaggagtgggtgacaagagcctgatctcttcctgttttgtacatagatttatttttcagttccaagaaagatgaatacattttgttaaaaaaaataaaaaaaa

SEQ ID NO: 284 - DNA, 2748 bp, Homo sapiens
gctccgggcggcgtgcgccgcggtgcctagtgtgggatgtaagcgcggaggccgccgcccaccgcccgccgccatggggctgaaggccgcccagaagacgctgttcccgctgcgctccatcgacgacgtggtgcgcctgtttgctgccgagctgggccgagaggagccggacctggtgctcctttccttggtgctgggcttcgtggagcattttctggctgtcaaccgcgtcatccctaccaacgttcccgagctcaccttccagcccagccccgcccccgacccgcctggcggcctcacctactttcccgtggccgacctgtctatcatcgccgccctctatgcccgcttcaccgcccagatccgaggcgccgtcgacctgtccctctatcctcgagaagggggtgtctccagccgtgagctggtgaagaaggtctccgatgtcatatggaacagcctcagccgctcctacttcaaggatcgggcccacatccagtccctcttcagcttcatcacaggttggagcccagtaggcaccaaattggacagctccggtgtggcctttgctgtggttggggcctgccaggccctgggtctccgggatgtccacctcgccctgtctgaggatcatgcctgggtagtgtttgggcccaatggggagcagacagctgaggtcacctggcacggcaagggcaacgaggaccgcaggggccagacagtcaatgccggtgtggctgagcggagctggctgtacctgaaaggatcatacatgcgctgtgaccgcaagatggaggtggcgttcatggtgtgtgccatcaacccttccattgacctgcacaccgactcgctggagcttctgcagctgcagcagaagctgctctggctgctctatgacctgggacatctggaaaggtaccccatggccttagggaacctggcagatctagaggagctggagcccacccctggccggccagacccactcaccctctaccacaagggcattgcctcagccaagacctactatcgggatgaacacatctacccctacatgtacctggctggctaccactgtcgcaaccgcaatgtgcgggaagccctgcaggcctgggcggacacggccactgtcatccaggactacaactactgccgggaagacgaggagatctacaaggagttctttgaagtagccaatgatgtcatccccaacctgctgaaggaggcagccagcttgctggaggcgggcgaggagcggccgggggagcaaagccagggcacccagagccaaggttccgccctccaggaccctgagtgcttcgcccacctgctgcgattctacgacggcatctgcaaatgggaggagggcagtcccacgcctgtgctgcacgtgggctgggccacctttcttgtgcagtccctaggccgttttgagggacaggtgcggcagaaggtgcgcatagtgagccgagaggccgaggcggccgaggccgaggagccgtggggcgaggaagcccgggaaggccggcggcggggcccacggcgggagtccaagccagaggagcccccgccgcccaagaagccagcactggacaagggcctgggcaccggccagggtgcagtgtcaggacccccccggaagcctcctgggactgtcgctggcacagcccgaggccctgaaggtggcagcacggctcaggtgccagcacccgcagcatcaccaccgccggagggtccagtgctcactttccagagtgagaagatgaagggcatgaaggagctgctggtggccaccaagatcaactcgagcgccatcaagctgcaactcacggcacagtcgcaagtgcagatgaagaagcagaaagtgtccacccctagtgactacactctgtctttcctcaagcggcagcgcaaaggcctctgaactactggggacttcggaccgcttgtggggacccaggctccgcccttagtcccccaactctgagcccatgttctgcccccagcccaaaggggacaggcctcacctctacccaaaccctaggttcccggtcccgagtacagtctgtatcaaacccacgattttctccagctcagaacccagggctctgccccagtcgttagaatataggtctcttctcccagaatcccagccggccaatggaaacctcacgctgggtcctaattaccagtctttaaaggcccagcccctagaaacccaagctcctcctcggaaccgctcacctagagccagaccaacgttactcagggctcctcccagcttgtaggagctgaggtttcacccttaacccaaggagcacaggtcccacctccagcccgggagcctaggaccactcagcccctaggagtatatttccgcacttcagaattccatatcttgcgaatccaagctccctgccccaaataacttcagtcctgctccagaatttggaaatcctagtttcctctccttcgtatcccgagtctgggacacaaaactccgcccccagcctatgagcatcctgagccccgccctcttcctgacgaaactggccccggatcagagcaggacctcccttccgaccctctgggaacctcccagaggtccagcccatctcggagcatcccggaggaaatctgcagagggttaggagtgggtgacaagagcctgatctcttcctgttttgtacatagatttatttttcagttccaagaaagatgaatacattttgttaaaaaaaataaaaaaaa

SEQ ID NO: 285 - DNA, 2736 bp, Homo sapiens
gctccgggcggcgtgcgccgcggtgcctagtgtgggatgccgccgcccaccgcccgccgccatggggctgaaggccgcccagaagacgctgttcccgctgcgctccatcgacgacgtggtgcgcctgtttgctgccgagctgggccgagaggagccggacctggtgctcctttccttggtgctgggcttcgtggagcattttctggctgtcaaccgcgtcatccctaccaacgttcccgagctcaccttccagcccagccccgcccccgacccgcctggcggcctcacctactttcccgtggccgacctgtctatcatcgccgccctctatgcccgcttcaccgcccagatccgaggcgccgtcgacctgtccctctatcctcgagaagggggtgtctccagccgtgagctggtgaagaaggtctccgatgtcatatggaacagcctcagccgctcctacttcaaggatcgggcccacatccagtccctcttcagcttcatcacaggttggagcccagtaggcaccaaattggacagctccggtgtggcctttgctgtggttggggcctgccaggccctgggtctccgggatgtccacctcgccctgtctgaggatcatgcctgggtagtgtttgggcccaatggggagcagacagctgaggtcacctggcacggcaagggcaacgaggaccgcaggggccagacagtcaatgccggtgtggctgagcggagctggctgtacctgaaaggatcatacatgcgctgtgaccgcaagatggaggtggcgttcatggtgtgtgccatcaacccttccattgacctgcacaccgactcgctggagcttctgcagctgcagcagaagctgctctggctgctctatgacctgggacatctggaaaggtaccccatggccttagggaacctggcagatctagaggagctggagcccacccctggccggccagacccactcaccctctaccacaagggcattgcctcagccaagacctactatcgggatgaacacatctacccctacatgtacctggctggctaccactgtcgcaaccgcaatgtgcgggaagccctgcaggcctgggcggacacggccactgtcatccaggactacaactactgccgggaagacgaggagatctacaaggagttctttgaagtagccaatgatgtcatccccaacctgctgaaggaggcagccagcttgctggaggcgggcgaggagcggccgggggagcaaagccagggcacccagagccaaggttccgccctccaggaccctgagtgcttcgcccacctgctgcgattctacgacggcatctgcaaatgggaggagggcagtcccacgcctgtgctgcacgtgggctgggccacctttcttgtgcagtccctaggccgttttgagggacaggtgcggcagaaggtgcgcatagtgagccgagaggccgaggcggccgaggccgaggagccgtggggcgaggaagcccgggaaggccggcggcggggcccacggcgggagtccaagccagaggagcccccgccgcccaagaagccagcactggacaagggcctgggcaccggccagggtgcagtgtcaggacccccccggaagcctcctgggactgtcgctggcacagcccgaggccctgaaggtggcagcacggctcaggtgccagcacccgcagcatcaccaccgccggagggtccagtgctcactttccagagtgagaagatgaagggcatgaaggagctgctggtggccaccaagatcaactcgagcgccatcaagctgcaactcacggcacagtcgcaagtgcagatgaagaagcagaaagtgtccacccctagtgactacactctgtctttcctcaagcggcagcgcaaaggcctctgaactactggggacttcggaccgcttgtggggacccaggctccgcccttagtcccccaactctgagcccatgttctgcccccagcccaaaggggacaggcctcacctctacccaaaccctaggttcccggtcccgagtacagtctgtatcaaacccacgattttctccagctcagaacccagggctctgccccagtcgttagaatataggtctcttctcccagaatcccagccggccaatggaaacctcacgctgggtcctaattaccagtctttaaaggcccagcccctagaaacccaagctcctcctcggaaccgctcacctagagccagaccaacgttactcagggctcctcccagcttgtaggagctgaggtttcacccttaacccaaggagcacaggtcccacctccagcccgggagcctaggaccactcagcccctaggagtatatttccgcacttcagaattccatatcttgcgaatccaagctccctgccccaaataacttcagtcctgctccagaatttggaaatcctagtttcctctccttcgtatcccgagtctgggacacaaaactccgcccccagcctatgagcatcctgagccccgccctcttcctgacgaaactggccccggatcagagcaggacctcccttccgaccctctgggaacctcccagaggtccagcccatctcggagcatcccggaggaaatctgcagagggttaggagtgggtgacaagagcctgatctcttcctgttttgtacatagatttatttttcagttccaagaaagatgaatacattttgttaaaaaaaataaaaaaaa

SEQ ID NO: 286 - DNA, 3172 bp, Homo sapiens
caatccctgagtatctcgggaaggaggtgtccggagccgcggacctagagatcccagaagccacagcgcagcggcccggcccgccactatttccaggctcagcggggcaggggtgggcccagactccacttcccggcgggtagtgcgaccctaggggcgggacttcatgtcccagcaggctccgggcggcgtgcgccgcggtgcctagtgtgggatgtaagcgcggaggtgggcgagggggaccgaggccaggactctccttggggtttgggggcttgacctgggtgcgctttctggacagactttacagccccgggggcacagtcgtagagagggggcggggcggccattggggctcctcattggggtgcttggggcgcaccccatcgggtaccgggcgtcccggaattgtgggggacaaaaaggctctgcagtctcggctgaggggtctcaccgacaaaagaggggaagccggccgccgcccaccgcccgccgccatggggctgaaggccgcccagaagacgctgttcccgctgcgctccatcgacgacgtggtgcgcctgtttgctgccgagctgggccgagaggagccggacctggtgctcctttccttggtgctgggcttcgtggagcattttctggctgtcaaccgcgtcatccctaccaacgttcccgagctcaccttccagcccagccccgcccccgacccgcctggcggcctcacctactttcccgtggccgacctgtctatcatcgccgccctctatgcccgcttcaccgcccagatccgaggcgccgtcgacctgtccctctatcctcgagaagggggtgtctccagccgtgagctggtgaagaaggtctccgatgtcatatggaacagcctcagccgctcctacttcaaggatcgggcccacatccagtccctcttcagcttcatcacaggttggagcccagtaggcaccaaattggacagctccggtgtggcctttgctgtggttggggcctgccaggccctgggtctccgggatgtccacctcgccctgtctgaggatcatgcctgggtagtgtttgggcccaatggggagcagacagctgaggtcacctggcacggcaagggcaacgaggaccgcaggggccagacagtcaatgccggtgtggctgagcggagctggctgtacctgaaaggatcatacatgcgctgtgaccgcaagatggaggtggcgttcatggtgtgtgccatcaacccttccattgacctgcacaccgactcgctggagcttctgcagctgcagcagaagctgctctggctgctctatgacctgggacatctggaaaggtaccccatggccttagggaacctggcagatctagaggagctggagcccacccctggccggccagacccactcaccctctaccacaagggcattgcctcagccaagacctactatcgggatgaacacatctacccctacatgtacctggctggctaccactgtcgcaaccgcaatgtgcgggaagccctgcaggcctgggcggacacggccactgtcatccaggactacaactactgccgggaagacgaggagatctacaaggagttctttgaagtagccaatgatgtcatccccaacctgctgaaggaggcagccagcttgctggaggcgggcgaggagcggccgggggagcaaagccagggcacccagagccaaggttccgccctccaggaccctgagtgcttcgcccacctgctgcgattctacgacggcatctgcaaatgggaggagggcagtcccacgcctgtgctgcacgtgggctgggccacctttcttgtgcagtccctaggccgttttgagggacaggtgcggcagaaggtgcgcatagtgagccgagaggccgaggcggccgaggccgaggagccgtggggcgaggaagcccgggaaggccggcggcggggcccacggcgggagtccaagccagaggagcccccgccgcccaagaagccagcactggacaagggcctgggcaccggccagggtgcagtgtcaggacccccccggaagcctcctgggactgtcgctggcacagcccgaggccctgaaggtggcagcacggctcaggtgccagcacccgcagcatcaccaccgccggagggtccagtgctcactttccagagtgagaagatgaagggcatgaaggagctgctggtggccaccaagatcaactcgagcgccatcaagctgcaactcacggcacagtcgcaagtgcagatgaagaagcagaaagtgtccacccctagtgactacactctgtctttcctcaagcggcagcgcaaaggcctctgaactactggggacttcggaccgcttgtggggacccaggctccgcccttagtcccccaactctgagcccatgttctgcccccagcccaaaggggacaggcctcacctctacccaaaccctaggttcccggtcccgagtacagtctgtatcaaacccacgattttctccagctcagaacccagggctctgccccagtcgttagaatataggtctcttctcccagaatcccagccggccaatggaaacctcacgctgggtcctaattaccagtctttaaaggcccagcccctagaaacccaagctcctcctcggaaccgctcacctagagccagaccaacgttactcagggctcctcccagcttgtaggagctgaggtttcacccttaacccaaggagcacaggtcccacctccagcccgggagcctaggaccactcagcccctaggagtatatttccgcacttcagaattccatatcttgcgaatccaagctccctgccccaaataacttcagtcctgctccagaatttggaaatcctagtttcctctccttcgtatcccgagtctgggacacaaaactccgcccccagcctatgagcatcctgagccccgccctcttcctgacgaaactggccccggatcagagcaggacctcccttccgaccctctgggaacctcccagaggtccagcccatctcggagcatcccggaggaaatctgcagagggttaggagtgggtgacaagagcctgatctcttcctgttttgtacatagatttatttttcagttccaagaaagatgaatacattttgttaaaaaaaataaaaaaaa

SEQ ID NO: 287 - DNA, 3179 bp, Homo sapiens
tatatttatgtatatgcacatacacacaaaattaggcgggagtggtggcgcacgcctgtgatcacagctactcgggaggctgaggcacgagaatcgcttgagcccgtgaagtcgaggctgcagtgagcccagatcgagccactgcattccagcctgggcgaaagagaaagaccgtgtctcaaaacaaacaaacaaaagctactcttagcacgtgttagagtatctcgcgggcggaagtgggaaacgagtgctgcacacagagtaggcatctttatatgttaacagacactgatacccagctaaagcggctgaacacatttactctctggcagtgtttaaaagtatctgtttttctcatattgttttattttaattttttctggatcaagcaacctgatctttttcctcataacttgccgaccgacccgtgacagcaaaaccggcagaagctcggcgacctcccaccccgagtctgcaggtagccgccgcccaccgcccgccgccatggggctgaaggccgcccagaagacgctgttcccgctgcgctccatcgacgacgtggtgcgcctgtttgctgccgagctgggccgagaggagccggacctggtgctcctttccttggtgctgggcttcgtggagcattttctggctgtcaaccgcgtcatccctaccaacgttcccgagctcaccttccagcccagccccgcccccgacccgcctggcggcctcacctactttcccgtggccgacctgtctatcatcgccgccctctatgcccgcttcaccgcccagatccgaggcgccgtcgacctgtccctctatcctcgagaagggggtgtctccagccgtgagctggtgaagaaggtctccgatgtcatatggaacagcctcagccgctcctacttcaaggatcgggcccacatccagtccctcttcagcttcatcacaggttggagcccagtaggcaccaaattggacagctccggtgtggcctttgctgtggttggggcctgccaggccctgggtctccgggatgtccacctcgccctgtctgaggatcatgcctgggtagtgtttgggcccaatggggagcagacagctgaggtcacctggcacggcaagggcaacgaggaccgcaggggccagacagtcaatgccggtgtggctgagcggagctggctgtacctgaaaggatcatacatgcgctgtgaccgcaagatggaggtggcgttcatggtgtgtgccatcaacccttccattgacctgcacaccgactcgctggagcttctgcagctgcagcagaagctgctctggctgctctatgacctgggacatctggaaaggtaccccatggccttagggaacctggcagatctagaggagctggagcccacccctggccggccagacccactcaccctctaccacaagggcattgcctcagccaagacctactatcgggatgaacacatctacccctacatgtacctggctggctaccactgtcgcaaccgcaatgtgcgggaagccctgcaggcctgggcggacacggccactgtcatccaggactacaactactgccgggaagacgaggagatctacaaggagttctttgaagtagccaatgatgtcatccccaacctgctgaaggaggcagccagcttgctggaggcgggcgaggagcggccgggggagcaaagccagggcacccagagccaaggttccgccctccaggaccctgagtgcttcgcccacctgctgcgattctacgacggcatctgcaaatgggaggagggcagtcccacgcctgtgctgcacgtgggctgggccacctttcttgtgcagtccctaggccgttttgagggacaggtgcggcagaaggtgcgcatagtgagccgagaggccgaggcggccgaggccgaggagccgtggggcgaggaagcccgggaaggccggcggcggggcccacggcgggagtccaagccagaggagcccccgccgcccaagaagccagcactggacaagggcctgggcaccggccagggtgcagtgtcaggacccccccggaagcctcctgggactgtcgctggcacagcccgaggccctgaaggtggcagcacggctcaggtgccagcacccgcagcatcaccaccgccggagggtccagtgctcactttccagagtgagaagatgaagggcatgaaggagctgctggtggccaccaagatcaactcgagcgccatcaagctgcaactcacggcacagtcgcaagtgcagatgaagaagcagaaagtgtccacccctagtgactacactctgtctttcctcaagcggcagcgcaaaggcctctgaactactggggacttcggaccgcttgtggggacccaggctccgcccttagtcccccaactctgagcccatgttctgcccccagcccaaaggggacaggcctcacctctacccaaaccctaggttcccggtcccgagtacagtctgtatcaaacccacgattttctccagctcagaacccagggctctgccccagtcgttagaatataggtctcttctcccagaatcccagccggccaatggaaacctcacgctgggtcctaattaccagtctttaaaggcccagcccctagaaacccaagctcctcctcggaaccgctcacctagagccagaccaacgttactcagggctcctcccagcttgtaggagctgaggtttcacccttaacccaaggagcacaggtcccacctccagcccgggagcctaggaccactcagcccctaggagtatatttccgcacttcagaattccatatcttgcgaatccaagctccctgccccaaataacttcagtcctgctccagaatttggaaatcctagtttcctctccttcgtatcccgagtctgggacacaaaactccgcccccagcctatgagcatcctgagccccgccctcttcctgacgaaactggccccggatcagagcaggacctcccttccgaccctctgggaacctcccagaggtccagcccatctcggagcatcccggaggaaatctgcagagggttaggagtgggtgacaagagcctgatctcttcctgttttgtacatagatttatttttcagttccaagaaagatgaatacattttgttaaaaaaaataaaaaaaa

SEQ ID NO: 288 - DNA, 3051 bp, Homo sapiens
tatatttatgtatatgcacatacacacaaaattaggcgggagtggtggcgcacgcctgtgatcacagctactcgggaggctgaggcacgagaatcgcttgagcccgtgaagtcgaggctgcagtgagcccagatcgagccactgcattccagcctgggcgaaagagaaagaccgtgtctcaaaacaaacaaacaaaagctactcttagcacgtgttagagtatctcgcgggcggaagtgggaaacgagtgctgcacacagacaacctgatctttttcctcataacttgccgaccgacccgtgacagcaaaaccggcagaagctcggcgacctcccaccccgagtctgcaggtagccgccgcccaccgcccgccgccatggggctgaaggccgcccagaagacgctgttcccgctgcgctccatcgacgacgtggtgcgcctgtttgctgccgagctgggccgagaggagccggacctggtgctcctttccttggtgctgggcttcgtggagcattttctggctgtcaaccgcgtcatccctaccaacgttcccgagctcaccttccagcccagccccgcccccgacccgcctggcggcctcacctactttcccgtggccgacctgtctatcatcgccgccctctatgcccgcttcaccgcccagatccgaggcgccgtcgacctgtccctctatcctcgagaagggggtgtctccagccgtgagctggtgaagaaggtctccgatgtcatatggaacagcctcagccgctcctacttcaaggatcgggcccacatccagtccctcttcagcttcatcacaggttggagcccagtaggcaccaaattggacagctccggtgtggcctttgctgtggttggggcctgccaggccctgggtctccgggatgtccacctcgccctgtctgaggatcatgcctgggtagtgtttgggcccaatggggagcagacagctgaggtcacctggcacggcaagggcaacgaggaccgcaggggccagacagtcaatgccggtgtggctgagcggagctggctgtacctgaaaggatcatacatgcgctgtgaccgcaagatggaggtggcgttcatggtgtgtgccatcaacccttccattgacctgcacaccgactcgctggagcttctgcagctgcagcagaagctgctctggctgctctatgacctgggacatctggaaaggtaccccatggccttagggaacctggcagatctagaggagctggagcccacccctggccggccagacccactcaccctctaccacaagggcattgcctcagccaagacctactatcgggatgaacacatctacccctacatgtacctggctggctaccactgtcgcaaccgcaatgtgcgggaagccctgcaggcctgggcggacacggccactgtcatccaggactacaactactgccgggaagacgaggagatctacaaggagttctttgaagtagccaatgatgtcatccccaacctgctgaaggaggcagccagcttgctggaggcgggcgaggagcggccgggggagcaaagccagggcacccagagccaaggttccgccctccaggaccctgagtgcttcgcccacctgctgcgattctacgacggcatctgcaaatgggaggagggcagtcccacgcctgtgctgcacgtgggctgggccacctttcttgtgcagtccctaggccgttttgagggacaggtgcggcagaaggtgcgcatagtgagccgagaggccgaggcggccgaggccgaggagccgtggggcgaggaagcccgggaaggccggcggcggggcccacggcgggagtccaagccagaggagcccccgccgcccaagaagccagcactggacaagggcctgggcaccggccagggtgcagtgtcaggacccccccggaagcctcctgggactgtcgctggcacagcccgaggccctgaaggtggcagcacggctcaggtgccagcacccgcagcatcaccaccgccggagggtccagtgctcactttccagagtgagaagatgaagggcatgaaggagctgctggtggccaccaagatcaactcgagcgccatcaagctgcaactcacggcacagtcgcaagtgcagatgaagaagcagaaagtgtccacccctagtgactacactctgtctttcctcaagcggcagcgcaaaggcctctgaactactggggacttcggaccgcttgtggggacccaggctccgcccttagtcccccaactctgagcccatgttctgcccccagcccaaaggggacaggcctcacctctacccaaaccctaggttcccggtcccgagtacagtctgtatcaaacccacgattttctccagctcagaacccagggctctgccccagtcgttagaatataggtctcttctcccagaatcccagccggccaatggaaacctcacgctgggtcctaattaccagtctttaaaggcccagcccctagaaacccaagctcctcctcggaaccgctcacctagagccagaccaacgttactcagggctcctcccagcttgtaggagctgaggtttcacccttaacccaaggagcacaggtcccacctccagcccgggagcctaggaccactcagcccctaggagtatatttccgcacttcagaattccatatcttgcgaatccaagctccctgccccaaataacttcagtcctgctccagaatttggaaatcctagtttcctctccttcgtatcccgagtctgggacacaaaactccgcccccagcctatgagcatcctgagccccgccctcttcctgacgaaactggccccggatcagagcaggacctcccttccgaccctctgggaacctcccagaggtccagcccatctcggagcatcccggaggaaatctgcagagggttaggagtgggtgacaagagcctgatctcttcctgttttgtacatagatttatttttcagttccaagaaagatgaatacattttgttaaaaaaaataaaaaaaa

SEQ ID NO: 289 - DNA, 2662 bp, Homo sapiens
gaagagacccagcaacccacagagttgagaaatttgactggcattcaagctgtccaatcaatagctgccgctgaagggtggggctggatggcgtaagctacagctgaaggaagaacgtgagcacgaggcactgaggtgattggctgaaggcacttccgttgagcatctagacgtttccttggctcttctggcgccaaaatgtcgttcgtggcaggggttattcggcggctggacgagacagtggtgaaccgcatcgcggcgggggaagttatccagcggccagctaatgctatcaaagagatgattgagaactgtttagatgcaaaatccacaagtattcaagtgattgttaaagagggaggcctgaagttgattcagatccaagacaatggcaccgggatcaggaaagaagatctggatattgtatgtgaaaggttcactactagtaaactgcagtcctttgaggatttagccagtatttctacctatggctttcgaggtgaggctttggccagcataagccatgtggctcatgttactattacaacgaaaacagctgatggaaagtgtgcatacagagcaagttactcagatggaaaactgaaagcccctcctaaaccatgtgctggcaatcaagggacccagatcacggtggaggaccttttttacaacatagccacgaggagaaaagctttaaaaaatccaagtgaagaatatgggaaaattttggaagttgttggcaggtattcagtacacaatgcaggcattagtttctcagttaaaaaacaaggagagacagtagctgatgttaggacactacccaatgcctcaaccgtggacaatattcgctccatctttggaaatgctgttagtcgagaactgatagaaattggatgtgaggataaaaccctagccttcaaaatgaatggttacatatccaatgcaaactactcagtgaagaagtgcatcttcttactcttcatcaaccatcgtctggtagaatcaacttccttgagaaaagccatagaaacagtgtatgcagcctatttgcccaaaaacacacacccattcctgtacctcagtttagaaatcagtccccagaatgtggatgttaatgtgcaccccacaaagcatgaagttcacttcctgcacgaggagagcatcctggagcgggtgcagcagcacatcgagagcaagctcctgggctccaattcctccaggatgtacttcacccagactttgctaccaggacttgctggcccctctggggagatggttaaatccacaacaagtctgacctcgtcttctacttctggaagtagtgataaggtctatgcccaccagatggttcgtacagattcccgggaacagaagcttgatgcatttctgcagcctctgagcaaacccctgtccagtcagccccaggccattgtcacagaggataagacagatatttctagtggcagggctaggcagcaagatgaggagatgcttgaactcccagcccctgctgaagtggctgccaaaaatcagagcttggagggggatacaacaaaggggacttcagaaatgtcagagaagagaggacctacttccagcaaccccagaaagagacatcgggaagattctgatgtggaaatggtggaagatgattcccgaaaggaaatgactgcagcttgtaccccccggagaaggatcattaacctcactagtgttttgagtctccaggaagaaattaatgagcagggacatgaggttctccgggagatgttgcataaccactccttcgtgggctgtgtgaatcctcagtgggccttggcacagcatcaaaccaagttataccttctcaacaccaccaagcttagtgaagaactgttctaccagatactcatttatgattttgccaattttggtgttctcaggttatcggagccagcaccgctctttgaccttgccatgcttgccttagatagtccagagagtggctggacagaggaagatggtcccaaagaaggacttgctgaatacattgttgagtttctgaagaagaaggctgagatgcttgcagactatttctctttggaaattgatgaggaagggaacctgattggattaccccttctgattgacaactatgtgccccctttggagggactgcctatcttcattcttcgactagccactgaggtgaattgggacgaagaaaaggaatgttttgaaagcctcagtaaagaatgcgctatgttctattccatccggaagcagtacatatctgaggagtcgaccctctcaggccagcagagtgaagtgcctggctccattccaaactcctggaagtggactgtggaacacattgtctataaagccttgcgctcacacattctgcctcctaaacatttcacagaagatggaaatatcctgcagcttgctaacctgcctgatctatacaaagtctttgagaggtgttaaatatggttatttatgcactgtgggatgtgttcttctttctctgtattccgatacaaagtgttgtatcaaagtgtgatatacaaagtgtaccaacataagtgttggtagcacttaagacttatacttgccttctgatagtattcctttatacacagtggattgattataaataaatagatgtgtcttaacataa

SEQ ID NO: 290 - DNA, 2473 bp, Homo sapiens
acaacggcggaggccgccgggttccctgacgtgccagtcaggccttctccttttccgcagaccgtgtgtttctttaccgctctcccccgagaccttttaagggttgtttggagttttagatgcaaaatccacaagtattcaagtgattgttaaagagggaggcctgaagttgattcagatccaagacaatggcaccgggatcaggaaagaagatctggatattgtatgtgaaaggttcactactagtaaactgcagtcctttgaggatttagccagtatttctacctatggctttcgaggctttggccagcataagccatgtggctcatgttactattacaacgaaaacagctgatggaaagtgtgcatacagagcaagttactcagatggaaaactgaaagcccctcctaaaccatgtgctggcaatcaagggacccagatcacggtggaggaccttttttacaacatagccacgaggagaaaagctttaaaaaatccaagtgaagaatatgggaaaattttggaagttgttggcaggtattcagtacacaatgcaggcattagtttctcagttaaaaaacaaggagagacagtagctgatgttaggacactacccaatgcctcaaccgtggacaatattcgctccatctttggaaatgctgttagtcgagaactgatagaaattggatgtgaggataaaaccctagccttcaaaatgaatggttacatatccaatgcaaactactcagtgaagaagtgcatcttcttactcttcatcaaccatcgtctggtagaatcaacttccttgagaaaagccatagaaacagtgtatgcagcctatttgcccaaaaacacacacccattcctgtacctcagtttagaaatcagtccccagaatgtggatgttaatgtgcaccccacaaagcatgaagttcacttcctgcacgaggagagcatcctggagcgggtgcagcagcacatcgagagcaagctcctgggctccaattcctccaggatgtacttcacccagactttgctaccaggacttgctggcccctctggggagatggttaaatccacaacaagtctgacctcgtcttctacttctggaagtagtgataaggtctatgcccaccagatggttcgtacagattcccgggaacagaagcttgatgcatttctgcagcctctgagcaaacccctgtccagtcagccccaggccattgtcacagaggataagacagatatttctagtggcagggctaggcagcaagatgaggagatgcttgaactcccagcccctgctgaagtggctgccaaaaatcagagcttggagggggatacaacaaaggggacttcagaaatgtcagagaagagaggacctacttccagcaaccccagaaagagacatcgggaagattctgatgtggaaatggtggaagatgattcccgaaaggaaatgactgcagcttgtaccccccggagaaggatcattaacctcactagtgttttgagtctccaggaagaaattaatgagcagggacatgaggttctccgggagatgttgcataaccactccttcgtgggctgtgtgaatcctcagtgggccttggcacagcatcaaaccaagttataccttctcaacaccaccaagcttagtgaagaactgttctaccagatactcatttatgattttgccaattttggtgttctcaggttatcggagccagcaccgctctttgaccttgccatgcttgccttagatagtccagagagtggctggacagaggaagatggtcccaaagaaggacttgctgaatacattgttgagtttctgaagaagaaggctgagatgcttgcagactatttctctttggaaattgatgaggaagggaacctgattggattaccccttctgattgacaactatgtgccccctttggagggactgcctatcttcattcttcgactagccactgaggtgaattgggacgaagaaaaggaatgttttgaaagcctcagtaaagaatgcgctatgttctattccatccggaagcagtacatatctgaggagtcgaccctctcaggccagcagagtgaagtgcctggctccattccaaactcctggaagtggactgtggaacacattgtctataaagccttgcgctcacacattctgcctcctaaacatttcacagaagatggaaatatcctgcagcttgctaacctgcctgatctatacaaagtctttgagaggtgttaaatatggttatttatgcactgtgggatgtgttcttctttctctgtattccgatacaaagtgttgtatcaaagtgtgatatacaaagtgtaccaacataagtgttggtagcacttaagacttatacttgccttctgatagtattcctttatacacagtggattgattataaataaatagatgtgtcttaacataaaaaaaaaaaaaaaaaa

SEQ ID NO: 291 - DNA, 2473 bp, Homo sapiens
acaacggcggaggccgccgggttccctgacgtgccagtcaggccttctccttttccgcagaccgtgtgtttctttaccgctctcccccgagaccttttaagggttgtttggagtatgcaaaatccacaagtattcaagtgattgttaaagagggaggcctgaagttgattcagatccaagacaatggcaccgggatcaggaaagaagatctggatattgtatgtgaaaggttcactactagtaaactgcagtcctttgaggatttagccagtatttctacctatggctttcgaggtgaggctttggccagcataagccatgtggctcatgttactattacaacgaaaacagctgatggaaagtgtgcatacagagcaagttactcagatggaaaactgaaagcccctcctaaaccatgtgctggcaatcaagggacccagatcacggtggaggaccttttttacaacatagccacgaggagaaaagctttaaaaaatccaagtgaagaatatgggaaaattttggaagttgttggcaggtattcagtacacaatgcaggcattagtttctcagttaaaaaacaaggagagacagtagctgatgttaggacactacccaatgcctcaaccgtggacaatattcgctccatctttggaaatgctgttagtcgagaactgatagaaattggatgtgaggataaaaccctagccttcaaaatgaatggttacatatccaatgcaaactactcagtgaagaagtgcatcttcttactcttcatcaaccatcgtctggtagaatcaacttccttgagaaaagccatagaaacagtgtatgcagcctatttgcccaaaaacacacacccattcctgtacctcagtttagaaatcagtccccagaatgtggatgttaatgtgcaccccacaaagcatgaagttcacttcctgcacgaggagagcatcctggagcgggtgcagcagcacatcgagagcaagctcctgggctccaattcctccaggatgtacttcacccagactttgctaccaggacttgctggcccctctggggagatggttaaatccacaacaagtctgacctcgtcttctacttctggaagtagtgataaggtctatgcccaccagatggttcgtacagattcccgggaacagaagcttgatgcatttctgcagcctctgagcaaacccctgtccagtcagccccaggccattgtcacagaggataagacagatatttctagtggcagggctaggcagcaagatgaggagatgcttgaactcccagcccctgctgaagtggctgccaaaaatcagagcttggagggggatacaacaaaggggacttcagaaatgtcagagaagagaggacctacttccagcaaccccagaaagagacatcgggaagattctgatgtggaaatggtggaagatgattcccgaaaggaaatgactgcagcttgtaccccccggagaaggatcattaacctcactagtgttttgagtctccaggaagaaattaatgagcagggacatgaggttctccgggagatgttgcataaccactccttcgtgggctgtgtgaatcctcagtgggccttggcacagcatcaaaccaagttataccttctcaacaccaccaagcttagtgaagaactgttctaccagatactcatttatgattttgccaattttggtgttctcaggttatcggagccagcaccgctctttgaccttgccatgcttgccttagatagtccagagagtggctggacagaggaagatggtcccaaagaaggacttgctgaatacattgttgagtttctgaagaagaaggctgagatgcttgcagactatttctctttggaaattgatgaggaagggaacctgattggattaccccttctgattgacaactatgtgccccctttggagggactgcctatcttcattcttcgactagccactgaggtgaattgggacgaagaaaaggaatgttttgaaagcctcagtaaagaatgcgctatgttctattccatccggaagcagtacatatctgaggagtcgaccctctcaggccagcagagtgaagtgcctggctccattccaaactcctggaagtggactgtggaacacattgtctataaagccttgcgctcacacattctgcctcctaaacatttcacagaagatggaaatatcctgcagcttgctaacctgcctgatctatacaaagtctttgagaggtgttaaatatggttatttatgcactgtgggatgtgttcttctttctctgtattccgatacaaagtgttgtatcaaagtgtgatatacaaagtgtaccaacataagtgttggtagcacttaagacttatacttgccttctgatagtattcctttatacacagtggattgattataaataaatagatgtgtcttaacataaaaaaaaaaaaaaaaaa

SEQ ID NO: 292 - DNA, 2386 bp, Homo sapiens
acaacggcggaggccgccgggttccctgacgtgccagtcaggccttctccttttccgcagaccgtgtgtttctttaccgctctcccccgagaccttttaagggttgtttggagttttagatgcaaaatccacaagtattcaagtgattgttaaagagggaggcctgaagttgattcagatccaagacaatggcaccgggatcaggaaagaagatctggatattgtatgtgaaaggttcactactagtaaactgcagtcctttgaggatttagccagtatttctacctatggctttcgaggtgaggctttggccagcataagccatgtggctcatgttactattacaacgaaaacagctgatggaaagtgtgcatacagagcaagttactcagatggaaaactgaaagcccctcctaaaccatgtgctggcaatcaagggacccagatcacggtattcagtacacaatgcaggcattagtttctcagttaaaaaacaaggagagacagtagctgatgttaggacactacccaatgcctcaaccgtggacaatattcgctccatctttggaaatgctgttagtcgagaactgatagaaattggatgtgaggataaaaccctagccttcaaaatgaatggttacatatccaatgcaaactactcagtgaagaagtgcatcttcttactcttcatcaaccatcgtctggtagaatcaacttccttgagaaaagccatagaaacagtgtatgcagcctatttgcccaaaaacacacacccattcctgtacctcagtttagaaatcagtccccagaatgtggatgttaatgtgcaccccacaaagcatgaagttcacttcctgcacgaggagagcatcctggagcgggtgcagcagcacatcgagagcaagctcctgggctccaattcctccaggatgtacttcacccagactttgctaccaggacttgctggcccctctggggagatggttaaatccacaacaagtctgacctcgtcttctacttctggaagtagtgataaggtctatgcccaccagatggttcgtacagattcccgggaacagaagcttgatgcatttctgcagcctctgagcaaacccctgtccagtcagccccaggccattgtcacagaggataagacagatatttctagtggcagggctaggcagcaagatgaggagatgcttgaactcccagcccctgctgaagtggctgccaaaaatcagagcttggagggggatacaacaaaggggacttcagaaatgtcagagaagagaggacctacttccagcaaccccagaaagagacatcgggaagattctgatgtggaaatggtggaagatgattcccgaaaggaaatgactgcagcttgtaccccccggagaaggatcattaacctcactagtgttttgagtctccaggaagaaattaatgagcagggacatgaggttctccgggagatgttgcataaccactccttcgtgggctgtgtgaatcctcagtgggccttggcacagcatcaaaccaagttataccttctcaacaccaccaagcttagtgaagaactgttctaccagatactcatttatgattttgccaattttggtgttctcaggttatcggagccagcaccgctctttgaccttgccatgcttgccttagatagtccagagagtggctggacagaggaagatggtcccaaagaaggacttgctgaatacattgttgagtttctgaagaagaaggctgagatgcttgcagactatttctctttggaaattgatgaggaagggaacctgattggattaccccttctgattgacaactatgtgccccctttggagggactgcctatcttcattcttcgactagccactgaggtgaattgggacgaagaaaaggaatgttttgaaagcctcagtaaagaatgcgctatgttctattccatccggaagcagtacatatctgaggagtcgaccctctcaggccagcagagtgaagtgcctggctccattccaaactcctggaagtggactgtggaacacattgtctataaagccttgcgctcacacattctgcctcctaaacatttcacagaagatggaaatatcctgcagcttgctaacctgcctgatctatacaaagtctttgagaggtgttaaatatggttatttatgcactgtgggatgtgttcttctttctctgtattccgatacaaagtgttgtatcaaagtgtgatatacaaagtgtaccaacataagtgttggtagcacttaagacttatacttgccttctgatagtattcctttatacacagtggattgattataaataaatagatgtgtcttaacataaaaaaaaaaaaaaaaaa

SEQ ID NO: 293 - DNA, 1500 bp, Homo sapiens
ccaaccattctctgcaagctaagccctgctgtctgcagggactctaggattgccgacatgagcgcaccaacactgaaatgatgagtcaggttgattatggtcagaagatcttcttgcacctccaactcagggcctacaccgcggataaagaccaggaggtagttctcataggccacaaaagcctggtcgtccaaggcaagagaataggctttaaagtccctggctcggttaaaaagctggttgcgtagattcctgtcaatgctcaggatcctctgccttgtgatatctggagataagtcaacgccttgcaggacgcttacatgctcgggcagtacctctctcagcaacacctccatgcactggtatacaaagtccccctcaccccagccgcgacccttcaaggccaagaggcggcagagcccgaggcctgcacgagcagctctctcttcaggagtgaaggaggccacgggcaagtcgccctgacgcagacgctccaccagggccgcgcgctcgccgtccgccacataccgctcgtagtattcgtgctcagcctcgtagtggcgcctgacgtcgcgttcgcgggtagctacgatgaggcggcgacagaccaggcacagggccccatcgccctccggaggctccaccaccaaataacgctgggtccactcgggccggaaaactagagcctcgtcgacttccatcttgcttcttttgggcgtcatccacattctgcgggaggccacaagagcagggccaacgttagaaaggccgcaaggggagaggaggagcctgagaagcgccaagcacctcctccgctctgcgccagatcacctcagcagaggcacacaagcccggttccggcatctctgctcctattggctggatatttcgtattccccgagctcctaaaaacgaaccaataggaagagcggacagcgatctctaacgcgcaagcgcatatccttctaggtagcgggcagtagccgcttcagggagggacgaagagacccagcaacccacagagttgagaaatttgactggcattcaagctgtccaatcaatagctgccgctgaagggtggggctggatggcgtaagctacagctgaaggaagaacgtgagcacgaggcactgaggtgattggctgaaggcacttccgttgagcatctagacgtttccttggctcttctggcgccaaaatgtcgttcgtggcaggggttattcggcggctggacgagacagtggtgaaccgcatcgcggcgggggaagttatccagcggccagctaatgctatcaaagagatgattgagaactggtacggagggagtcgagccgggctcacttaagggctacgacttaacgggccgcgtcactcaatggcgcggacacgcctctttgcccgggcagaggcatgtacagcgcatgcccacaacggcggaggccgccgggttccctgacgtgccagtcaggccttctccttttccgcagaccgtgtgtttct

SEQ ID NO: 294 - DNA, 1314 bp, Homo sapiens
ggccgcgcgctcgccgtccgccacataccgctcgtagtattcgtgctcagcctcgtagtggcgcctgacgtcgcgttcgcgggtagctacgatgaggcggcgacagaccaggcacagggccccatcgccctccggaggctccaccaccaaataacgctgggtccactcgggccggaaaactagagcctcgtcgacttccatcttgcttcttttgggcgtcatccacattctgcgggaggccacaagagcagggccaacgttagaaaggccgcaaggggagaggaggagcctgagaagcgccaagcacctcctccgctctgcgccagatcacctcagcagaggcacacaagcccggttccggcatctctgctcctattggctggatatttcgtattccccgagctcctaaaaacgaaccaataggaagagcggacagcgatctctaacgcgcaagcgcatatccttctaggtagcgggcagtagccgcttcagggagggacgaagagacccagcaacccacagagttgagaaatttgactggcattcaagctgtccaatcaatagctgccgctgaagggtggggctggatggcgtaagctacagctgaaggaagaacgtgagcacgaggcactgaggtgattggctgaaggcacttccgttgagcatctagacgtttccttggctcttctggcgccaaaatgtcgttcgtggcaggggttattcggcggctggacgagacagtggtgaaccgcatcgcggcgggggaagttatccagcggccagctaatgctatcaaagagatgattgagaactggtacggagggagtcgagccgggctcacttaagggctacgacttaacgggccgcgtcactcaatggcgcggacacgcctctttgcccgggcagaggcatgtacagcgcatgcccacaacggcggaggccgccgggttccctgacgtgccagtcaggccttctccttttccgcagaccgtgtgtttctttaccgctctcccccgagaccttttaagggttgtttggagtgtaagtggaggaatatacgtagtgttgtcttaatggtaccgttaactaagtaaggaagccacttaatttaaaattatgtatgcagaacatgcgaagttaaaagatgtataaaagcttaagatggggagaaaaaccttttttcagagggtactgtgttactgttttcttgcttttcattcattccagaaatcatctgttcacatccaaaggcacaattcattttgagtttctttcaaaacaaatcgtttgtagttttaggacaggctgatgcac

SEQ ID NO: 295 - DNA, 1091 bp, Homo sapiens
ggccagaaaattcattgacttcctaaagatttattaactttctgcattacttttttttttcccctccatcgtaaatataaaagggaatagtagagaaaatcattcagaattttattttttagtgacattatttagtgacattttattagagtcacttaggaacctgaggctgaataaagttcaggtaaaagtaaaattagttgagaagagacatctgccaaaagaaatctatttttaacttcacttgctgtctttcctagaggaacagaaatagtgctgaatgtcctattagaaatgatggttgctctgcccgtctcttccctctctctcacacaatatgtaaactcatacagtgtatgagcctgtaagacaaaggaaaaacacgttaatgaggcactattgtttgtatttggagtttgttatcattgcttggctcatattaaaatatgtacattagagtagttgcagactgataaattattttctgtttgatttgccagtttagatgcaaaatccacaagtattcaagtgattgttaaagagggaggcctgaagttgattcagatccaagacaatggcaccgggatcagggtaagtaaaacctcaaagtagcaggatgtttgtgcgcttcatggaagagtcaggacctttctctgttctggaaactaggcttttgcagatgggattttttcactgaaaaattcaacaccaacaataaatatttattgagtacctattatttgctgggcactgttcaggggatgtgtcagtgaataaaatagattaaaatctattctcttctgatgcttacattatagtggtgggagacaaaatgggtataataaatattatattagatagcattaagtgctgtggagaaaactaaagcagggaggaagataggagtgtgcaagccagaaaggttgcaattaaattgagtagttcaggaaggcttcaatatggatgtgatatttgagagaccggtggaagtcaaggagcaagttgtgaggctatttaaaggtattcttggcttacagaacaatatacgcaaagactattaaatggaagcatacctgacatgttaaaggact

SEQ ID NO: 296 - DNA, 1099 bp, Homo sapiens
tgtggtagttcatgcctgtaatcccagtgctttgggaggtcaaggcagccagatcatttgagatcaggagttcgagaccagcatggccagcatagtgaagccccatctctactaaaaatacaagaaaaaattaaccaagcatggtggcgcatacctgtaatcccagccactctggaggctgagacatgaaaattgcttgaacccgggaggcggaggttgcagtgagctgagatctcgccactgcacttcagcctgggtgacagagcaagactctgtctcaaaggaggttgcagtgagctgagatctcgccactgcacttcagcctgggtgacagagcaagactctgtctcaaaaaaaaaaaaaacaaaaaccaagaaaagaaaaaaaaactcttctaagaggatttttttttcctggattaaatcaagaaaatgggaattcaaagagatttggaaaaatgagtaacatgattatttactcatctttttggtatctaacagaaagaagatctggatattgtatgtgaaaggttcactactagtaaactgcagtcctttgaggatttagccagtatttctacctatggctttcgaggtgaggtaagctaaagattcaagaaatgtgtaaaatatcctcctgtgatgacattgtctgtcatttgttagtatgtatttctcaacatagataaataaggtttggtaccttttacttgttaaatgtatgcaaatctgagcaaacttaatgaactttaactttcaaagactgagaattgttcataaataaactattttacctgcagagacctctgatatatgtttcttgatggaagtacccagtaccacctatgaagttttcttgtcaaaaaatcaaatgtgaatctgatcattacttagatctaagtaccaatatatgaaaaatataggagacaaggaagcatggtaaatgatactgagattgggagactacatggaaaaagacttgttcccttcaacagatagacagcagggaaaaaagaatagagaaaggagtaaagaacctgtagattaaaagacatttaagggacatatgaaccaggtccagtgtatagatcttacctaaa

SEQ ID NO: 297 - DNA, 1074 bp, Homo sapiens
ttggttataaaggggaaaaatggtcatgggtttttaaaatttgttttgtcttaattgcatttcaaatttacatttctaaatgaataattgcttatataaagcagttttgattaacaatataaaacactatctatttggagtgattcctttacccatttctgaaggcaagttttaaaaattactagaagacacttcattgagaatattattaaacatgcctatagttctaccacctcaacacaattgcttattaacacattaatgttttggtgtgttttggactttttaatatgtatttttcacttgttctagtaattatgctacagattgatcatttctttttcaacatgtcatcaaagcaagtgagcaaagtgctcatcgttgccacatattaatacaaaatggaagcagcagttcagataacctttccctttggtgaggtgacagtgggtgacccagcagtgagtttttctttcagtctattttcttttcttccttaggctttggccagcataagccatgtggctcatgttactattacaacgaaaacagctgatggaaagtgtgcatacaggtatagtgctgacttcttttactcatatatattcattctgaaatgtattttttgcctaggtctcagagtaatcctgtctcaacaccagtgttatcttttttggcagagatcttgagtacgttttcttttctccttattgataaattgataatcctcaaggatgattattaggtgatactcttacttcatggattcttaaaagatatgatttaacatattacaagtgcctagcaaggtgtctgttacacgtaggtattttaagtaaatggtagctgctgatgtaatttctgcccctttgcccttcagttggggtattgctttggaccgattagagggctgtggctgggatgctaaaggttcatgtttccttagctggctcctgagccaccagctcccaccacctgtgtatacctgtgctagtttgccttcccacaagtagctgctggctatctgttatgctggtacagttttcagaaactgatgaatggcctttgaacaga

SEQ ID NO: 298 - DNA, 1073 bp, Homo sapiens
tgctggaagaacagatagtttttcaaatccaattcaaggactgggtatggtggctcatgcctgtaatcccagcactttgggaggccgaggcaggcgtatccaggagttcgagactagcctgaccaacatggtgaaactccgtctctactaaaaatacaaaattagccaggtgtggtggtgggcacctgtaatctcagctacttgggaggctgaggcaggagaatcgcttgaacctggtaggcggaggttgtagtgagctgagattgtgccattgctctccagcctgggaaacaagagcaaaactccgtctcaaaaaaaaaaaaaatccaattcaaatgattatggaagtagtggagaaataaacaggaaaatgataaataattaagataatatataatatggctatattttaatctattgttgatatgattttctcttttccccttgggattagtatctatctctctactggatattaatttgttatattttctcattagagcaagttactcagatggaaaactgaaagcccctcctaaaccatgtgctggcaatcaagggacccagatcacggtaagaatggtacatgggagagtaaattgttgaagctttgtttgtataaatattggaataaaaaataaaattgcttctaagttttcagggtaataataaaatgaatttgcactagttaatggaggtcccaagatatcctctaagcaagataaatgactattggcttttgtggcatggcagcctgccacgtccttgtcttttttaagggctaggagattctttattgggatggcaaaagtcaatggcagggtagttgtcattgaaagaagattaagcttgaccccagaaggcatgggttagagcccagccttgtcactcaatggttgtatgtccagaggcaagtcacttaacatcccttaaccccagttttctcatctgtcaaatgaagcaaagaatacttgccctcttgacttaaagggtgtctgatgagacatatgactgtatcattagctgggagaaagtccatcgtgctgcctatgtatagtgcctcaagttggtct

SEQ ID NO: 299 - DNA, 1092 bp, Homo sapiens
gtatttttagtagagacagggtttcaccatgttggccaggctggtctcgaactcctgacctcaggtgacccacccaccttggcctcccaaagttctgggattacagacgtgagccactgcacccagcctgaaaaatatctttgaatgccatgtgatactatacttgtcagtttacatgtgtgtcccactaaatcatgtactctcctgagcaggatcatgctttgtcttcatattttctgtacaaagcaaagactctgacacaaagctagcccccagtgcatagttgagaaatcagtgaatgaatgtgggaggcaggaaaaatgtcctttaattcttctgttaatgctgtcttatccctggccccagtcagtgcttagaactgtgctgttggtaaatataattggattcactatcttaagacctcgcttttgccaggacatcttgggttttattttcaagtacttctatgaatttacaagaaaaatcaatcttctgttcaggtggaggaccttttttacaacatagccacgaggagaaaagctttaaaaaatccaagtgaagaatatgggaaaattttggaagttgttggcaggtacagtccaaaatctgggagtgggtctctgagatttgtcatcaaagtaatgtgttctagtgctcatacattgaacagttgctgagctagatggtgaaaagtaaaactagcttacagatagtttctggtcaaggtttagccaccaattttgcagtttctctcatctccccaggaaagagcagttggtctttagatcaatgagagctcttttatggcagacaaaacaaagtgactctagccaacttgagctaaaaagaaatttagtggaaggctaggagttaccacatgaagtgtgtgcagctgccccttggagagaataagaaccagggtgcctctgggacttaacatcattactgtactccagttgttttcattcttttcctgactttgctctagagtcagtttcctaacagagtacattcgatgatcatgtgcccatatctgtggggagaagatttcttgattggcagtcttactaagggtgcatatcaagtagaatg

SEQ ID NO: 300 - DNA, 1043 bp, Homo sapiens
aacatggcgaaacgccatctctactaaaaatacaaaaaaaattagctgggcctggtggcaggcgcctataatcccagctactcgggaggctgaggcgggagaatcgcttgagtccaggaggcggaggttgcagtgagctgagatcgtgccattgcactccagcctgggcaacaagagcaaaactctgtctcaaaaataaataaaaataaataaaaaagagatagtggcgtgatatccttgattctatcagcaacctataaaagtagagaggagtctgtgttttgattcagtcacctttagcatttttatttccatgaagtttctgctggtttatttttctgtgggtaaaatattaataggctgtatggagatatttttctttatatgtacctttgtttagattactcaactccactaatttatttaactaaaagggggctctgacatctagtgtgtgtttttggcaactcttttcttactcttttgtttttcttttccaggtattcagtacacaatgcaggcattagtttctcagttaaaaaagtaagttcttggtttatgggggatggttttgttttatgaaaagaaaaaaggggatttttaatagtttgctggtggagataaggttatgatgtttcagtctcagccatgagacaataaatccttgtgtcttctgctgtttgtttatcagcaaggagagacagtagctgatgttaggacactacccaatgcctcaaccgtggacaatattcgctccatctttggaaatgctgttagtcggtatgtcgataacctatataaaaaaatcttttacatttattatcttggtttatcattccatcacattattttggaacctttcaagatattatgtgtgttaagagtttgctttagtcaaatacacaggcttgttttatgcttcagatttgttaatggagttcttatttcacgtaatcaacactttctaggtgtatgtaatctcctagattctgtggcgtgaatcatgtgttctttcaaggtcttagtcttgaaaatatttatag

SEQ ID NO: 301 - DNA, 1089 bp, Homo sapiens
aaaaataaataaaaataaataaaaaagagatagtggcgtgatatccttgattctatcagcaacctataaaagtagagaggagtctgtgttttgattcagtcacctttagcatttttatttccatgaagtttctgctggtttatttttctgtgggtaaaatattaataggctgtatggagatatttttctttatatgtacctttgtttagattactcaactccactaatttatttaactaaaagggggctctgacatctagtgtgtgtttttggcaactcttttcttactcttttgtttttcttttccaggtattcagtacacaatgcaggcattagtttctcagttaaaaaagtaagttcttggtttatgggggatggttttgttttatgaaaagaaaaaaggggatttttaatagtttgctggtggagataaggttatgatgtttcagtctcagccatgagacaataaatccttgtgtcttctgctgtttgtttatcagcaaggagagacagtagctgatgttaggacactacccaatgcctcaaccgtggacaatattcgctccatctttggaaatgctgttagtcggtatgtcgataacctatataaaaaaatcttttacatttattatcttggtttatcattccatcacattattttggaacctttcaagatattatgtgtgttaagagtttgctttagtcaaatacacaggcttgttttatgcttcagatttgttaatggagttcttatttcacgtaatcaacactttctaggtgtatgtaatctcctagattctgtggcgtgaatcatgtgttctttcaaggtcttagtcttgaaaatatttatagtgtagtagaactattttatcctccaatgctccttcttttccttgtatttccattatcatcactttaggatttcacttatttatcattcaacatttattaattgcctctcatattccaggctttgtgctagaagttagggatataaagacaaataagatatttcctgcccttaaagactagattcgtgttgctaagtcttcattatcaagaaaagcataagtggggaaaagtgcttgc

SEQ ID NO: 302 - DNA, 1113 bp, Homo sapiens
accttccctccccagtaaacactcctgggaacaacacacattgtagaaccacgttgtggtgctgttcagtatagcaagtaattcagcagagataagttcttggaatctcatctttgggatttagttactaagatacattcaagtttgagcaaaataaggtctcagagcttggattcattgttctgttccagcaattagagcagtacctggcacatagcacaagtgcttgaaaacactgactgagtagggtaggtgggtgagtgggtgggtgggtgggtgggtggatggatggatgggaggatgggtgggtgaatgggtgaacagacaaatggatggatgaatggacaggcacaggaggacctcaaatggaccaagtcttcggggccctcatttcacaaagttagtttatgggaaggaaccttgtgtttttaaattctgattcttttgtaatgtttgagttttgagtattttcaaaagcttcagaatctcttttctaatagagaactgatagaaattggatgtgaggataaaaccctagccttcaaaatgaatggttacatatccaatgcaaactactcagtgaagaagtgcatcttcttactcttcatcaaccgtaagttaaaaagaaccacatgggaaatccactcacaggaaacacccacagggaattttatgggaccatggaaaaatttctgatccataggtttgattaaacatggagaaacctcatggcaaagtttggttttattgggaagcatgtataatttttgtcctaagtctgtgctcagccctcccacatgtgctcattgctggttgactgttggagtctggttcttacctctaagaggaagcccaggagagggcataaagccagcacactgtcctcacctgatggtgtcagagtccttacgagtaagccctagccagaacattgctggaagagatcaagggccactgtttgaaattgcacagcaggatacggaaaaggggtaccttaggtataggcattgtcattaaagaaattgctaagatacttgagattttcctgtttaaggaatgagctttatgatacaaagagcagttctaaaaattagggagggaattaactaaatt

SEQ ID NO: 303 - DNA, 1094 bp, Homo sapiens
ggctcccgaagcacctagaaccggaagagttggctcactatttagcacacacacacgtctataatagtgctggccacttggggttggaattagtttatttatcagcatgttgtctcccagcacttggtgtgtgtgatatgcagtatgtatttgcagaatgaaaagtctgagggctgacatcatatttcccactgtgcccagaaagagcacagttagtccacatgagctaatgggggcaaagggaagtgaggagggagaatgtactgccttatcatgttttctattacttggctgaagtaaaacagtcccaagccgatagtaagatagtgggctggaaagtggcgacaggtaaaggtgcacctttcttcctggggatgtgatgtgcatatcactacagaaatgtctttcctgaggtgatttcatgactttgtgtgaatgtacacctgtgacctcacccctcaggacagttttgaactggttgctttctttttattgtttagatcgtctggtagaatcaacttccttgagaaaagccatagaaacagtgtatgcagcctatttgcccaaaaacacacacccattcctgtacctcaggtaatgtagcaccaaactcctcaaccaagactcacaaggaacagatgttctatcaggctctcctctttgaaagagatgagcatgctaatagtacaatcagagtgaatcccatacaccactggcaaaaggatgttctgtcccttcttacaggtacaaggcacagttttccttcatttattcactaatttagcagaacctcactaagagcctcctatatgccaggctctgcgttagcaataaaaggaatgccatgcctcaccccatcaggaggtgctgatagcttgtaggcggagtggaaacagatgtgctctagaggctctaaatattacttctgctggggtcagttgggaagccacaacagctactgttcatcttccataaaagacaatcagccgggcacagtggctcacacctgtaaatcccagcactttgggaggctgaggtgggtggatcacaaggtcaggtgtttgagaccagcctggccaacgtggcgaaaccct

SEQ ID NO: 304 - DNA, 1154 bp, Homo sapiens
tgactccctggttgaagggattctcctccctcagcctcccgagtacctgggattacaggcatgcgccaccacgcccagctaatttttgtatttttagtagagacgtggtttcatcatgttggccaggatggtctcgatctcctgaccttgtgatccacccgcctcggcctccccaaatgctgggattacaggcgtgagccaccacgcccggccacttggcatgaatttaattcccgccataaacctgtgagataggtaattctgttatatccactttacaaatgaagagactgaggcaaagaaagatgatgtaacttacgcaaagctacacagctcttaagtagcagtgccaatatttgaacacactcagactcgatcctgaggttttgaccactgtgtcatctggcctcaaatcttctggccaccacatacaccatatgtgggctttttctccccctcccactatctaaggtaattgttctctcttattttcctgacagtttagaaatcagtccccagaatgtggatgttaatgtgcaccccacaaagcatgaagttcacttcctgcacgaggagagcatcctggagcgggtgcagcagcacatcgagagcaagctcctgggctccaattcctccaggatgtacttcacccaggtcagggcgcttctcatccagctacttctctggggcctttgaaatgtgcccggccagacgtgagagcccagatttttgcctgttatttaggaactttctttgcaagtattacctggatagttttaacattttcttctttgaacctagttataaaggtattgtgctgttgttcctaggcttagagtcataaggcctgagctcacttcctcactttgcctccatctggaaccttagaccaacttcctaggaaaacgagctgtctgaaaacagaatagggtgcctcttcaatgtgctcttcactggagatgttcaggaggaggctactcccacctacacagggtgcagtggagggtctgggccccagggaggcagcaggaagagtggaaagagcggaggctctactgttggacagacctgggttaccagccgtgtgactagccttccctggcctccatatccccctcagtaatgaaggaatgtgtcatccccaaatccaggga

SEQ ID NO: 305 - DNA, 1371 bp, Homo sapiens
ttgttgccaggagctgggaggaaggggaagtgagaaattgtttaatgggcacagagtttcagtttggggaagatgaaaaagttctagagatagctggtggtgatggttgcgcaacaatgtaaatgccactgagctctcatttaaaaatggttaaaatggtaaattttatatatattttaccacaataaaaaaaagtcttcttctgggagcacccccccaagacaaaaatatgaaaattttacactgatacttccatttcaagataattttaagattataaggattttgcttaattcttgaattttatacctgtaaaccttttatacttcaaatttcgggcagaattgcttctataacaatgataattatacctcatactagcttctttcttagtactgctccatttggggacctgtatatctatacttcttattctgagtctctccactatatatatatatatatatatatatttttttttttttttttttttaatacagactttgctaccaggacttgctggcccctctggggagatggttaaatccacaacaagtctgacctcgtcttctacttctggaagtagtgataaggtctatgcccaccagatggttcgtacagattcccgggaacagaagcttgatgcatttctgcagcctctgagcaaacccctgtccagtcagccccaggccattgtcacagaggataagacagatatttctagtggcagggctaggcagcaagatgaggagatgcttgaactcccagcccctgctgaagtggctgccaaaaatcagagcttggagggggatacaacaaaggggacttcagaaatgtcagagaagagaggacctacttccagcaaccccaggtatggccttttgggaaaagtacagcctacctcctttattctgtaataaaactgccttctaactttggcttttcatgaatcacttgcatcttctctctgcctgacttgccctctggaatggtgctggaatggtcctgtggccttgtccactgtctgcctttgaccataacttgaaagtcacccaccatagtgtcctttgaaataacttaaatgtccacagttccaagcatgagttaaaaacacttcagaatgtagagtagttgttcaattgaataaacacacacaccagaaaaaaaagcaagtttatcttttatttttagtaaagaattttgatagagcctcaacaccagaaatggctagagagagaagcctaacatatctggaggattatttttcatcctacttaaagctgctttcacttttttcaggaaaaaacacacgttctgaatctaatttataaaactccctggccgggtgctgtggctcacacctataatccc

SEQ ID NO: 306 - DNA, 1149 bp, Homo sapiens
ggcagaggctgcagtgagctgagatcacaccacagcactccagcctggaagacatagtgagactctctctcaaaaaaaaaaaaaaaaaaaaaggaagtaagcattgtgagggcaggtaccttctctgttttgttcattgctggatgtagttagtatacagcagtatctgatggatggatagatggaggaatgaatgaatgagacttcacaaattcagctcacttgctcaaggccctgcagctctacgggatgaagctatactccagagtcctgctacattggctgtgtggccagctgctgggatctgagggttgtcagataagcagtctaccagagaacagactgatcttgttggccttctgccagcacaggggttcattcacagctctgtagaaccagcacagagaagttgcttgctcctccaaaatgcaacccacaaaatttggctaagtttaaaaacaagaataataatgatctgcacttccttttcttcattgcagaaagagacatcgggaagattctgatgtggaaatggtggaagatgattcccgaaaggaaatgactgcagcttgtaccccccggagaaggatcattaacctcactagtgttttgagtctccaggaagaaattaatgagcagggacatgagggtacgtaaacgctgtggcctgcctgggatgcatagggcctcaactgccaaggttttggaaatggagaaagcagtcatgttgtcagagtggccactacagttttgctgggcaagctcctcttcctttactaacccacaatagcatcagcttaaagacaatttttgattgggagaaaagggagaaaaataatctctgtttattttaattagcattaattggtattcttgttaaaccataggagtcagagtaaatcagccatttcaccaattttcagtttgtttctgtcttagctaacagcagtgtaatggtcagcaaaattcttatcttgtgtactgaatggcatgtcctgttgctgaaagtgcacaggcttgggaggtagccatgagctcaaatcctggcactaccacctctcttgtgtgaccttagactcctgacctttctatgcctcagttctttcttacctataaaatgaaattaattttacccttaaagatcatcgt

SEQ ID NO: 307 - DNA, 1109 bp, Homo sapiens
cccttggagggacaggggagtgggcatgggcatagtagtatggttttccttttcactgggggtgcagcccttggagtctcagcttaatgtgttggggaagtggtctcctattagactctccatttcaaaccattccatgattttgtcctccttttgccaccttccgagcctgtaaaaactaatgtttgtgattcctgaggtttctctaatgtcttttaataaagttgacctcagagatctcgttacctctctgagttcctgctttgtcttagattttgatccttgagtgttctttaatcttttagcaattccttgttgcatgttaaaagattagttatattttattcctcatttgtgttcgttttcaccaggaggctcaattcaggcttctttgcttacttggtgtctctagttctggtgcctggtgctttggtcaatgaagtggggttggtaggattctattacttacctgttttttggttttattttttgttttgcagttctccgggagatgttgcataaccactccttcgtgggctgtgtgaatcctcagtgggccttggcacagcatcaaaccaagttataccttctcaacaccaccaagcttaggtaaatcagctgagtgtgtgaacaagcagagctactacaacaatggtccagggagcacaggcacaaaagctaaggagagcagcatgaggtagttgggagggcacaggctttggagtcagacacatgtggtttcaaatccaagttcgaccatttcccatttatttgactgtagacaagttacattcctaaactatgtctcagatttctcatctgtaagttgtggtattactagttaacatgcaggggttttgtttgtttgtttgtttgtttgtttgtgagggtaagaaataacccaagaagcctagtccttggtagttgctcagtgccctataaatgttgtgaaccaggtggtgagggtttggtgctgctagagaattctggtatctgctctgtgcaacagagtactgtaggtgatgcaagagaaagaagacctgatgccttctttcctcccagctttgagaatggagcaaaggcctaccccagccaccaagtgagccagt

SEQ ID NO: 308 - DNA, 1064 bp, Homo sapiens
atcatcctaaactacatgtcagcatagtataatcctgccttaggtctacttttgattatttaggaagactccctgcccttcctatacatttcacataatttttaataagttgtaaaaaagtgatttataggattctttgtaagtgggggaagttaagcagacaaaaagtttttaaatcttactgcagagtgtcaggaaccttttatagcaccagacaggtagggacagaacatgagtggcagcaagccagacttggtcttagtgctctaacctgtctgttagaggctggccagtcagacccctggttgaagacgttgggaatcccagctctttggaggggtaagagattttgttagactgttaaccagattccacagccaggcagaactatttctgtctcatccatgtttcagggattacttctcccattttgtcccaactggttgtatctcaagcatgaattcagcttttccttaaagtcacttcatttttattttcagtgaagaactgttctaccagatactcatttatgattttgccaattttggtgttctcaggttatcggtaagtttagatccttttcacttctgaaatttcaactgatcgtttctgaaaatagtagctctccactaatatcttatttgtagtatgttaaatttttctaaaacttctaaggatagttgctgtattgtatgatttgcatatggaggtatctataagaagttttatactttttagcaaaatagtcatttggtagccaacttaaacaaatgtttattaatatagaagttaataatatctactgatactcggccgggtgcggtggctcatgcctgtaatcccaccactttgggaggctgaggcgggcagatcatttgaggtcaggagttcaagaccagcctgaccaatatgatgaaaccctgtctctactaaattacaaatattagcagggtatggtggtgggcgcctgtaatcccagctactcaggaggctaaggcaggagaatcatttgaacccaggaggcagaggttgcaatgagctgagatcacgccactgcactccag

SEQ ID NO: 309 - DNA, 1165 bp, Homo sapiens
aaagtatgagtaacatattatcagaaggggagaaatggaagataacttaggcatcttatttttaagcatagttttccctttgtttctgcattagatgatttacctgaaatgtcattcaatttaacttactctccatcctcacccgcccagctttggttatgaggcagtagaaagaaatgatctgcctgtggttttctagaaatacgaaagttgagtccttaaggctacacagaaagaaagtacctccccagggcttcacccttcccatcctttcagcaggctttttgtctgtcgtatcttctctgttgaaatggccattgacaagaggaggaaaggggttttgttgtggattgttcaggcacttcctttggggtatatgggggatgagtgttacatttatggtttctcacctgccattctgatagtggattcttgggaattcaggcttcatttggatgctccgttaaagcttgctccttcatgttcttgcttcttcctaggagccagcaccgctctttgaccttgccatgcttgccttagatagtccagagagtggctggacagaggaagatggtcccaaagaaggacttgctgaatacattgttgagtttctgaagaagaaggctgagatgcttgcagactatttctctttggaaattgatgaggtgtgacagccattcttatacttctgttgtattcttcaaataaaatttccagccgggtgcggtggctcatggctgtaatcccagcactttgggaggctgaggtgggcagataacttggggtcaggagttcaaaaccagctggccaacatgatgaaaccccgtctctactaaaaaaatagaaaaattagccaggcgtggtggcgggtacctgtaatccaagctgctcaggaggctgaggcagaagaatcacttaaacccaagaggtagaagttgcagtgagccgagattgcaccactgcactctagcctaggcgacagcgagactgcgtctcaaaaaaaaaaaaaaagaacgttccaaggtcaggactaggcctcccctcagaagcagcaagtgacatatgtgacatcctctccactccctatttgcatttctaggttatataactgtactactatccatgcatgcctactcttgttcccagggtgaaggacccagacatg

SEQ ID NO: 310 - DNA, 1093 bp, Homo sapiens
aaaaaaaaaaaaagaacgttccaaggtcaggactaggcctcccctcagaagcagcaagtgacatatgtgacatcctctccactccctatttgcatttctaggttatataactgtactactatccatgcatgcctactcttgttcccagggtgaaggacccagacatggagagccgaatccctgcaggccattataaatgagattatgccatttgctcccatttcttcttattctttcatttttggggctctccatcttgatgtgttctttggatcgtgaacagatccaaagaaaaggttgttctgccgtgctgtttgtcaggatgaaaaactcttttttaagtgtttaggtctgcccccagtgcccagcccaatcaagtaacgtggtcacccagagtggcagataggagcacaaggcctgggaaagcactggagaaatgggatttgtttaaactatgacagcattatttcttgttcccttgtcctttttcctgcaagcaggaagggaacctgattggattaccccttctgattgacaactatgtgccccctttggagggactgcctatcttcattcttcgactagccactgaggtcagtgatcaagcagatactaagcatttcggtacatgcatgtgtgctggagggaaagggcaaatgaccaccctttgatctggaatgataaagatgataagggtgggatagctgaaggcctgctctcatccccactaatattcattcccagcaatattcagcagtcccatttacagttttaacgcctaaagtatcacatttcgttttttagctttaagtagtctgtgatctccgtttagaatgagaatgtttaaattcgtacctattttgaggtattgaatttctttggaccaggtgaattgggacgaagaaaaggaatgttttgaaagcctcagtaaagaatgcgctatgttctattccatccggaagcagtacatatctgaggagtcgaccctctcaggccagcaggtacagtggtgatgcacactggcaccccaggactaggacaggacctcatacaatctttaggagatgaaacttgcccatctctaaaatttcgg

SEQ ID NO: 311 - DNA, 1114 bp, Homo sapiens
cacccagagtggcagataggagcacaaggcctgggaaagcactggagaaatgggatttgtttaaactatgacagcattatttcttgttcccttgtcctttttcctgcaagcaggaagggaacctgattggattaccccttctgattgacaactatgtgccccctttggagggactgcctatcttcattcttcgactagccactgaggtcagtgatcaagcagatactaagcatttcggtacatgcatgtgtgctggagggaaagggcaaatgaccaccctttgatctggaatgataaagatgataagggtgggatagctgaaggcctgctctcatccccactaatattcattcccagcaatattcagcagtcccatttacagttttaacgcctaaagtatcacatttcgttttttagctttaagtagtctgtgatctccgtttagaatgagaatgtttaaattcgtacctattttgaggtattgaatttctttggaccaggtgaattgggacgaagaaaaggaatgttttgaaagcctcagtaaagaatgcgctatgttctattccatccggaagcagtacatatctgaggagtcgaccctctcaggccagcaggtacagtggtgatgcacactggcaccccaggactaggacaggacctcatacaatctttaggagatgaaacttgcccatctctaaaatttcgggatttctttgtacccaacaaggttcaaacacaacagtcagcttttattcatgatttttacttccatctgctgatgtagaacatacctccagagtgacctcagaaattgtcaaatgtgaaaacacaagccatcacagtgagaaatgggaggttgagttagattgtctaaggctggagagtccatatactcccactgttagctctgaagtgtgtagccagtcttcagattctgggtcagttgcctcagtctctcttagcttttgccttactctttatccgaccactgccctgccaggaaaacaaggctctataactcctcttacaggtcagcttgacacaaaaagggtgcctggattcctaatgtttcattgtcacttttcccagtcagatgataatgcttttcaaatca

SEQ ID NO: 312 - DNA, 1361 bp, Homo sapiens
tacttcctacagttgccatccaaatatcagtcaggatcagacatgatgttagctcctgctacaataaaaccattttctccctgaatgaaaacaaaggttccacaggagacagtcccacagagcagtggcttcttttcctccctttaaaacctcatgttggctggacacagtggctcacacctgtaatcccagcattttaggaggctgaggtgggaagatggcttaagcccaggagtttgaggctgtagagctatgatcacaccactgcccttcagcctgggtgacagagcaagaccttgtctctaaataaacaaacaaacaaaaaatcctcttgtgttcaggcctgtgggatcccctgagaggctagcccacaagatccacttcaaaagccctagataacaccaagtctttccagacccagtgcacatcccatcagccaggacaccagtgtatgttgggatgcaaacagggaggcttatgacatctaatgtgttttccagagtgaagtgcctggctccattccaaactcctggaagtggactgtggaacacattgtctataaagccttgcgctcacacattctgcctcctaaacatttcacagaagatggaaatatcctgcagcttgctaacctgcctgatctatacaaagtctttgagaggtgttaaatatggttatttatgcactgtgggatgtgttcttctttctctgtattccgatacaaagtgttgtatcaaagtgtgatatacaaagtgtaccaacataagtgttggtagcacttaagacttatacttgccttctgatagtattcctttatacacagtggattgattataaataaatagatgtgtcttaacataatttcttatttaattttattatgtatatattgtgtcagttcagatgccaaaaagaggtcttgaacatgtcacaggctctgatggcactgaccatggagaaagcttgatttgatcatctggtgtctacaataaccaaagctaattattaaggaaaaaaacttgaagaaagaaaatagtccttacttcatctataatgaggtttttgtttttttgttttgagacggagtcttgctttgttgcccaggccggagtgcagtggcgcgatattggctcactgcaacctccgcttaccgggttcaagcaattctcctgcctcagcttcctgagtagctgggattacaggcacctgccaccacgcccggctaatttttgtatttttagtagagatgtggtttcacgatgctggccaagctggtctcaaactcctgacctcaggtgatcctcccacctcagcctcccaaagttaagtgctgggattacaggcatgagccactgcggccg

SEQ ID NO: 313 - DNA, 1500 bp, Homo sapiens
ggctagcccacaagatccacttcaaaagccctagataacaccaagtctttccagacccagtgcacatcccatcagccaggacaccagtgtatgttgggatgcaaacagggaggcttatgacatctaatgtgttttccagagtgaagtgcctggctccattccaaactcctggaagtggactgtggaacacattgtctataaagccttgcgctcacacattctgcctcctaaacatttcacagaagatggaaatatcctgcagcttgctaacctgcctgatctatacaaagtctttgagaggtgttaaatatggttatttatgcactgtgggatgtgttcttctttctctgtattccgatacaaagtgttgtatcaaagtgtgatatacaaagtgtaccaacataagtgttggtagcacttaagacttatacttgccttctgatagtattcctttatacacagtggattgattataaataaatagatgtgtcttaacataatttcttatttaattttattatgtatatattgtgtcagttcagatgccaaaaagaggtcttgaacatgtcacaggctctgatggcactgaccatggagaaagcttgatttgatcatctggtgtctacaataaccaaagctaattattaaggaaaaaaacttgaagaaagaaaatagtccttacttcatctataatgaggtttttgtttttttgttttgagacggagtcttgctttgttgcccaggccggagtgcagtggcgcgatattggctcactgcaacctccgcttaccgggttcaagcaattctcctgcctcagcttcctgagtagctgggattacaggcacctgccaccacgcccggctaatttttgtatttttagtagagatgtggtttcacgatgctggccaagctggtctcaaactcctgacctcaggtgatcctcccacctcagcctcccaaagttaagtgctgggattacaggcatgagccactgcggccggcattaagtatgagtttttaagttagcccactttgttaatgactatgagtactaatagcttaagataaagaagtttctaggtaatcttgtttgaaggatgatgtaaaaatataaatttaaactgtgagtgacaaaataaacttccttaatatttgcctacatttagagaaatggagcattcagctcagaaaggaagaatgtctgtggttttaaggtaaaatccatattccaagactcagtgaagaaagttcagtgataaagaacagactactctcatcttatgaagaaatggagcaatttcacttggaaagactaggaagacaaaatgttacagacgtatttgttgtgccacaaaataggcaaggtcagttttgaacaataagaactccataaagtagaccagggcatctcagaagtgaggttccatgagcccaggtggggcacaggctgggtgatcttgagtggagaggaagaggggttttctgagcttcaagagctgg

SEQ ID NO: 314 - DNA, 7897 bp, Homo sapiens
aacaactggtgcgcatgcgcactggtgtctcgcggcctggcgcgccccctccgaagcgcatgctcgtgggcacgcacgagcctcaagatccaaggtgcgcgcgtcggcgtccgaggcggttggtgtcggagaatttgttaagcgggactccaggcaattatttccagtcagagaaggaaaccagtgcctggcattctcaccatctttctacctaccatgatcaagtgcttgtcagttgaagtacaagccaaattgcgttctggtttggccataagctccttgggccaatgtgttgaggaacttgccctcaacagtattgatgctgaagcaaaatgtgtggctgtcagggtgaatatggaaaccttccaagttcaagtgatagacaatggatttgggatggggagtgatgatgtagagaaagtgggaaatcgttatttcaccagtaaatgccactcggtacaggacttggagaatccaaggttttatggtttccgaggagaggccttggcaaatattgctgacatggccagtgctgtggaaatttcgtccaagaaaaacaggacaatgaaaacttttgtgaaactgtttcagagtggaaaagccctgaaagcttgtgaagctgatgtgactagagcaagcgctgggactactgtaacagtgtataacctattttaccagcttcctgtaaggaggaaatgcatggaccctagactggagtttgagaaggttaggcagagaatagaagctctctcactcatgcacccttccatttctttctctttgagaaatgatgtttctggttccatggttcttcagctccctaaaaccaaagacgtatgttcccgattttgtcaaatttatggattgggaaagtcccaaaagctaagagaaataagttttaaatataaagagtttgagcttagtggctatatcagctctgaagcacattacaacaagaatatgcagtttttgtttgtgaacaaaagactagttttaaggacaaagctacataaactcattgactttttattaaggaaagaaagtattatatgcaagccaaagaatggtcccaccagtaggcaaatgaattcaagtcttcggcaccggtctaccccagaactctatggcatatatgtaattaatgtgcagtgccaattctgtgagtatgatgtgtgcatggagccagccaaaactctgattgaatttcagaactgggacactctcttgttttgcattcaggaaggagtgaaaatgtttttaaagcaagaaaaattatttgtggaattatcaggtgaggatattaaggaatttagtgaagataatggttttagtttatttgatgctactcttcagaagcgtgtgacttccgatgagaggagcaatttccaggaagcatgtaataatattttagattcctatgagatgtttaatttgcagtcaaaagctgtgaaaagaaaaactactgcagaaaacgtaaacacacagagttctagggattcagaagctaccagaaaaaatacaaatgatgcatttttgtacatttatgaatcaggtggtccaggccatagcaaaatgacagagccatctttacaaaacaaagacagctcttgctcagaatcaaagatgttagaacaagagacaattgtagcatcagaagctggagaaaatgagaaacataaaaaatctttcctggaacatagctctttagaaaatccgtgtggaaccagtttagaaatgtttttaagcccttttcagacaccatgtcactttgaggagagtgggcaggatctagaaatatggaaagaaagtactactgttaatggcatggctgccaacatcttgaaaaataatagaattcagaatcaaccaaagagatttaaagatgctactgaagtgggatgccagcctctgccttttgcaacaacattatggggagtacatagtgctcagacagagaaagagaaaaaaaaagaatctagcaattgtggaagaagaaatgtttttagttatgggcgagttaaattatgttccactggctttataactcatgtagtacaaaatgaaaaaactaaatcaactgaaacagaacattcatttaaaaattatgttagacctggtcccacacgtgcccaagaaacatttggaaatagaacacgtcattcagttgaaactccagacatcaaagatttagccagcactttaagtaaagaatctggtcaattgcccaacaaaaaaaattgcagaacgaatataagttatgggctagagaatgaacctacagcaacttatacaatgttttctgcttttcaggaaggtagcaaaaaatcacaaacagattgcatattatctgatacatccccctctttcccctggtatagacacgtttccaatgatagtaggaaaacagataaattaattggtttctccaaaccaatcgtccgtaagaagctaagcttgagttcacagctaggatctttagagaagtttaagaggcaatatgggaaggttgaaaatcctctggatacagaagtagaggaaagtaatggagtcactaccaatctcagtcttcaagttgaacctgacattctgctgaaggacaagaaccgcttagagaactctgatgtttgtaaaatcactactatggagcatagtgattcagatagtagttgtcaaccagcaagccacatccttaactcagagaagtttccattctccaaggatgaagattgtttagaacaacagatgcctagtttgagagaaagtcctatgaccctgaaggagttatctctctttaatagaaaacctttggaccttgagaagtcatctgaatcactagcctctaaattatccagactgaagggttccgaaagagaaactcaaacaatggggatgatgagtcgttttaatgaacttccaaattcagattccagtaggaaagacagcaagttgtgcagtgtgttaacacaagatttttgtatgttatttaacaacaagcatgaaaaaacagagaatggtgtcatcccaacatcagattctgccacacaggataattcctttaataaaaatagtaaaacacattctaacagcaatacaacagagaactgtgtgatatcagaaactcctttggtattgccctataataattctaaagttaccggtaaagattcagatgttcttatcagagcctcagaacaacagataggaagtcttgactctcccagtggaatgttaatgaatccggtagaagatgccacaggtgaccaaaatggaatttgttttcagagtgaggaatctaaagcaagagcttgttctgaaactgaagagtcaaacacgtgttgttcagattggcagcggcatttcgatgtagccctgggaagaatggtttatgtcaacaaaatgactggactcagcacattcattgccccaactgaggacattcaggctgcttgtactaaagacctgacaactgtggctgtggatgttgtacttgagaatgggtctcagtacaggtgtcaaccttttagaagcgaccttgttcttcctttccttccgagagctcgagcagagaggactgtgatgagacaggataacagagatactgtggatgatactgttagtagcgaatcgcttcagtctttgttctcagaatgggacaatccagtatttgcccgttatccagaggttgctgttgatgtaagcagtggccaggctgagagcttagcagttaaaattcacaacatcttgtatccctatcgtttcaccaaaggaatgattcattcaatgcaggttctccagcaagtagataacaagtttattgcctgtttgatgagcactaagactgaagagaatggcgaggcaggtgggaacctgctcgtgctggtggatcagcacgctgcccatgagcgtatacgtctggagcagcttatcattgattcctacgagaagcaacaggcacaaggctctggtcggaaaaaattactgtcttctactctaattcctccgctagagataacagtgacagaggaacaaaggagactcttatggtgttaccacaaaaatctggaagatctgggccttgaatttgtatttccagacactagtgattctctggtccttgtgggaaaagtaccactatgttttgtggaaagagaagccaatgaacttcggagaggaagatctactgtgaccaagagtattgtggaggaatttatccgagaacaactggagctactccagaccaccggaggcatccaagggacattgccactgactgtccagaaggtgttggcatcccaagcctgccatggggccattaagtttaatgatggcctgagcttacaggaaagttgccgccttattgaagctctgtcctcatgccagctgccattccagtgtgctcacgggagaccttctatgctgccgttagctgacatagaccacttggaacaggaaaaacagattaaacccaacctcactaaacttcgcaaaatggcccaggcctggcgtctctttggaaaagcagagtgtgatacaaggcagagcctgcagcaatccatgcctccctgtgagccaccatgagaacagaatcactggtctaaaaggaacaaagggatgttcactgtatgcctctgagcagagagcagcagcagcaggtaccagcacggccctgactgaatcagcccagtgtccctgagcagcttagacagcagggctctctgtatcagtctttcttgagcagatgattcccctagttgagtagccagatgaaattcaagcctaaagacaattcattcatttgcatccatgggcacagaaggttgctatatagtatctaccttttgctacttatttaatgataaaatttaatgacagtttgattggttgcttggtttgttatttgaagggtgtgatttttgtttttgtacagttttttttcaagcttcacatttgcgtgtatctaattcagctgatgctcaagtccaaggggtagtctgccttcccaggctgcccccagggtttctgcactggtcccctcttttcccttcagtcttcttcacttccctatgctgctgcttcatgtgctacatctcagacttaaagagtttctctactacagtgaaaacattctctagggtctttcatcaggcctttagttattttagggataaaaactattgataaaaaggacaaggatagaacagagaaaatttaaagtcctgttccgggttttttgttatgttttctttaaaaactcagagactgatgttcaatatcccaaaccagtaaaatggtgaaaatactatgagcttgttttttaaaatatgattttttttggtactttataaagtatctctttatgtgaaagcaattgtcatatcaaaacacagcatacatacgttcaacctaaccaaatatctttacactttttctttcaggagacaagggttctttgggtccctttcaaacggtatcttggtgttattacattatgcctatctattgcccttataatatcacttgggaccaggactgatcgttctgcaaatgcttgttatgccattctcaatctatttttcccgcaccttttcacatgatttgtggttaataggactcaacagactaaaattgcatagtagaaaaaaaatgcaaaaagccagctggtaatgtttattgcaactggggtgctatacaattagtaagatgatgcaatgagaatttctacttttgtatttcctgaccagcctgctcaaagtggcttttatatcaattgaatgattttcctcattttttaatacaggaaaccaattcgtgctcatggaagaaaagttcctttgccagcagccttgaagtgaatcttacaggagcaatgaaagtattgcattcattagcgtctgccccagagaaggttcagagaaaaccttcacttgttttcaaggggatccttgtagatttacgtaattggaatcctgaagaacaggccctactgtctaaaaaatggcttttattcttctaaatacatataaacggatgttttatagatgggaagacatgaccttagaaaggagagagttttcagaggatttgccaggctgtcaggggctctgcctccaggcccagtgtggcagtgtggcctcagggcctccgcctccctgcttgagggctgcatggaggccaactgtcctgggagttgtaaaaatcttttaaggccagaccaatttgagggattttaaaaagtgtctcagtgcctcttatgatttcagaaggttttgctatatgtaatcccaactactgttttcttgagagtagcagaggattagaaaaagtcctccataaattatgtaaccggccttcctgactagcctgactcaagcaatgtaagagataattattctgttttcataatttataagtgtgggggcatgcctcagcataaaaacaacctattagggaaaaatatctaatagattacctttatcgcctgttagggttttatgttgtttttaactcagatgccataagaacaaagatacatgtaatttataatagtaatcattaatacctatattgtgctttaaggtttacaaaataatttttctcatactttatcttagtttagtttcttgacagtccatgaggtaaggtggtagctttatcaccattttacaaagtgggaaacgaaggttcctcttaggaacctagttgtcacctttgtataataaaacttcgaagctcggagctgttaactggtttgctgaaggcttagctgtaagagccagaattcagacccaggtctgagtgacttcaaactgcacagtccttcccattattacccatatgctatcccttatatttttaatttattaggaattcattcatttataaacttggtgattcacctttattagattctggtcgctgaaggctttagtaacttcagagtaaaacttgagagatgagatgtaaaatgcagccattcttgagagttcctttttctgtaacattcatcaacacttcattgagaagtgaaggttcctatggctgtctctaccttcaagaggcttagctttagtcactgagaaagacaaggaaactaatgatagaatatagtagcttcttctggcgttaggtatcacagagtcacagctagttacagctagccctttattattgaaagaagaggagctagcagtcccactatcagaattaagactagagatggtaataggagctagtatcagaaaagcttaaggcaaagcataaagtgtaggctagaatgaagctggagaatggggagggggcttgggtaacatccagaacctggctggggacctggaactacatgagatgtaagaatggagaggttctagcagtcagaggtcaggtacaaatgaacagctgggatctgcgcatggcagacagtgaaaaaacccaggcaagcaaaatggtcagagcagaaaggggcccaaggccacgttcttgagatgtggagggggctgaggaagccacgccaagtaaggacagatgcagctcagcagttcctagcgagccctgacaagccagctcagctgaagcttcgggtgggagccagtcatggcacagtggagtgaaggaagagcagtttcaggcacccaaaacctgacccccacgacctgttttccacctgaagagccacccattccatccaaacccttggcaaaagtctgctaacagagagaaccggccagtatgctggccagtcgcgatcatgcctgtctttaccctctaagctgaagctgctcatcaacggtgagatggcaaaaaggtgggtccagaagaggggaaaagaagggagtctgtgaaaacaaaatgctgaagaatctgcatcaaataaacccttccttccttcctttttccttca

SEQ ID NO: 315 - DNA, 7825 bp, Homo sapiens
aacaactggtgcgcatgcgcactggtgtctcgcggcctggcgcgccccctccgaagcgcatgctcgtgggcacgcacgagcctcaagatccaaggtgcgcgcgtcggcgtccgaggcggttggtgtcggagaatttgttaagcgggactccaggcaattatttccagtcagagaaggaaaccagtgcctggcattctcaccatctttctacctaccatgatcaagtgcttgtcagttgaagtacaagccaaattgcgttctggtttggccataagctccttgggccaatgtgttgaggaacttgccctcaacagtattgatgctgaagcaaaatgtgtggctgtcagggtgaatatggaaaccttccaagttcaagtgatagacaatggatttgggatggggagtgatgatgtagagaaagtgggaaatcgttatttcaccagtaaatgccactcggtacaggacttggagaatccaaggttttatggtttccgaggagaggccttggcaaatattgctgacatggccagtgctgtggaaatttcgtccaagaaaaacaggacaatgaaaacttttgtgaaactgtttcagagtggaaaagccctgaaagcttgtgaagctgatgtgactagagcaagcgctgggactactgtaacagtgtataacctattttaccagcttcctgtaaggaggaaatgcatggaccctagactggagtttgagaaggttaggcagagaatagaagctctctcactcatgcacccttccatttctttctctttgagaaatgatgtttctggttccatggttcttcagctccctaaaaccaaagacgtatgttcccgattttgtcaaatttatggattgggaaagtcccaaaagctaagagaaataagttttaaatataaagagtttgagcttagtggctatatcagctctgaagcacattacaacaagaatatgcagtttttgtttgtgaacaaaagactagttttaaggacaaagctacataaactcattgactttttattaaggaaagaaagtattatatgcaagccaaagaatggtcccaccagtaggcaaatgaattcaagtcttcggcaccggtctaccccagaactctatggcatatatgtaattaatgtgcagtgccaattctgtgagtatgatgtgtgcatggagccagccaaaactctgattgaatttcagaactgggacactctcttgttttgcattcaggaaggagtgaaaatgtttttaaagcaagaaaaattatttgtggaattatcaggtgaggatattaaggaatttagtgaagataatggttttagtttatttgatgctactcttcagaagcgtgtgacttccgatgagaggagcaatttccaggaagcatgtaataatattttagattcctatgagatgtttaatttgcagtcaaaagctgtgaaaagaaaaactactgcagaaaacgtaaacacacagagttctagggattcagaagctaccagaaaaaatacaaatgatgcatttttgtacatttatgaatcaggtggtccaggccatagcaaaatgacagagccatctttacaaaacaaagacagctcttgctcagaatcaaagatgttagaacaagagacaattgtagcatcagaagctggagaaaatgagaaacataaaaaatctttcctggaacatagctctttagaaaatccgtgtggaaccagtttagaaatgtttttaagcccttttcagacaccatgtcactttgaggagagtgggcaggatctagaaatatggaaagaaagtactactgttaatggcatggctgccaacatcttgaaaaataatagaattcagaatcaaccaaagagatttaaagatgctactgaagtgggatgccagcctctgccttttgcaacaacattatggggagtacatagtgctcagacagagaaagagaaaaaaaaagaatctagcaattgtggaagaagaaatgtttttagttatgggcgagttaaattatgttccactggctttataactcatgtagtacaaaatgaaaaaactaaatcaactgaaacagaacattcatttaaaaattatgttagacctggtcccacacgtgcccaagaaacatttggaaatagaacacgtcattcagttgaaactccagacatcaaagatttagccagcactttaagtaaagaatctggtcaattgcccaacaaaaaaaattgcagaacgaatataagttatgggctagagaatgaacctacagcaacttatacaatgttttctgcttttcaggaaggtagcaaaaaatcacaaacagattgcatattatctgatacatccccctctttcccctggtatagacacgtttccaatgatagtaggaaaacagataaattaattggtttctccaaaccaatcgtccgtaagaagctaagcttgagttcacagctaggatctttagagaagtttaagaggcaatatgggaaggttgaaaatcctctggatacagaagtagaggaaagtaatggagtcactaccaatctcagtcttcaagttgaacctgacattctgctgaaggacaagaaccgcttagagaactctgatgtttgtaaaatcactactatggagcatagtgattcagatagtagttgtcaaccagcaagccacatccttaactcagagaagtttccattctccaaggatgaagattgtttagaacaacagatgcctagtttgagagaaagtcctatgaccctgaaggagttatctctctttaatagaaaacctttggaccttgagaagtcatctgaatcactagcctctaaattatccagactgaagggttccgaaagagaaactcaaacaatggggatgatgagtcgttttaatgaacttccaaattcagattccagtaggaaagacagcaagttgtgcagtgtgttaacacaagatttttgtatgttatttaacaacaagcatgaaaaaacagagaatggtgtcatcccaacatcagattctgccacacaggataattcctttaataaaaatagtaaaacacattctaacagcaatacaacagagaactgtgtgatatcagaaactcctttggtattgccctataataattctaaagttaccggtaaagattcagatgttcttatcagagcctcagaacaacagataggaagtcttgactctcccagtggaatgttaatgaatccggtagaagatgccacaggtgaccaaaatggaatttgttttcagagtgaggaatctaaagcaagagcttgttctgaaactgaagagtcaaacacgtgttgttcagattggcagcggcatttcgatgtagccctgggaagaatggtttatgtcaacaaaatgactggactcagcacattcattgccccaactgaggacattcaggctgcttgtactaaagacctgacaactgtggctgtggatgttgtacttgagaatgggtctcagtacaggtgtcaaccttttagaagcgaccttgttcttcctttccttccgagagctcgagcagagaggactgtgatgagacaggataacagagatactgtggatgatactgttagtagcgaatcgcttcagtctttgttctcagaatgggacaatccagtatttgcccgttatccagaggttgctgttgatgtaagcagtggccaggctgagagcttagcagttaaaattcacaacatcttgtatccctatcgtttcaccaaaggaatgattcattcaatgcaggttctccagcaagtagataacaagtttattgcctgtttgatgagcactaagactgaagagaatggcgaggcagattcctacgagaagcaacaggcacaaggctctggtcggaaaaaattactgtcttctactctaattcctccgctagagataacagtgacagaggaacaaaggagactcttatggtgttaccacaaaaatctggaagatctgggccttgaatttgtatttccagacactagtgattctctggtccttgtgggaaaagtaccactatgttttgtggaaagagaagccaatgaacttcggagaggaagatctactgtgaccaagagtattgtggaggaatttatccgagaacaactggagctactccagaccaccggaggcatccaagggacattgccactgactgtccagaaggtgttggcatcccaagcctgccatggggccattaagtttaatgatggcctgagcttacaggaaagttgccgccttattgaagctctgtcctcatgccagctgccattccagtgtgctcacgggagaccttctatgctgccgttagctgacatagaccacttggaacaggaaaaacagattaaacccaacctcactaaacttcgcaaaatggcccaggcctggcgtctctttggaaaagcagagtgtgatacaaggcagagcctgcagcaatccatgcctccctgtgagccaccatgagaacagaatcactggtctaaaaggaacaaagggatgttcactgtatgcctctgagcagagagcagcagcagcaggtaccagcacggccctgactgaatcagcccagtgtccctgagcagcttagacagcagggctctctgtatcagtctttcttgagcagatgattcccctagttgagtagccagatgaaattcaagcctaaagacaattcattcatttgcatccatgggcacagaaggttgctatatagtatctaccttttgctacttatttaatgataaaatttaatgacagtttgattggttgcttggtttgttatttgaagggtgtgatttttgtttttgtacagttttttttcaagcttcacatttgcgtgtatctaattcagctgatgctcaagtccaaggggtagtctgccttcccaggctgcccccagggtttctgcactggtcccctcttttcccttcagtcttcttcacttccctatgctgctgcttcatgtgctacatctcagacttaaagagtttctctactacagtgaaaacattctctagggtctttcatcaggcctttagttattttagggataaaaactattgataaaaaggacaaggatagaacagagaaaatttaaagtcctgttccgggttttttgttatgttttctttaaaaactcagagactgatgttcaatatcccaaaccagtaaaatggtgaaaatactatgagcttgttttttaaaatatgattttttttggtactttataaagtatctctttatgtgaaagcaattgtcatatcaaaacacagcatacatacgttcaacctaaccaaatatctttacactttttctttcaggagacaagggttctttgggtccctttcaaacggtatcttggtgttattacattatgcctatctattgcccttataatatcacttgggaccaggactgatcgttctgcaaatgcttgttatgccattctcaatctatttttcccgcaccttttcacatgatttgtggttaataggactcaacagactaaaattgcatagtagaaaaaaaatgcaaaaagccagctggtaatgtttattgcaactggggtgctatacaattagtaagatgatgcaatgagaatttctacttttgtatttcctgaccagcctgctcaaagtggcttttatatcaattgaatgattttcctcattttttaatacaggaaaccaattcgtgctcatggaagaaaagttcctttgccagcagccttgaagtgaatcttacaggagcaatgaaagtattgcattcattagcgtctgccccagagaaggttcagagaaaaccttcacttgttttcaaggggatccttgtagatttacgtaattggaatcctgaagaacaggccctactgtctaaaaaatggcttttattcttctaaatacatataaacggatgttttatagatgggaagacatgaccttagaaaggagagagttttcagaggatttgccaggctgtcaggggctctgcctccaggcccagtgtggcagtgtggcctcagggcctccgcctccctgcttgagggctgcatggaggccaactgtcctgggagttgtaaaaatcttttaaggccagaccaatttgagggattttaaaaagtgtctcagtgcctcttatgatttcagaaggttttgctatatgtaatcccaactactgttttcttgagagtagcagaggattagaaaaagtcctccataaattatgtaaccggccttcctgactagcctgactcaagcaatgtaagagataattattctgttttcataatttataagtgtgggggcatgcctcagcataaaaacaacctattagggaaaaatatctaatagattacctttatcgcctgttagggttttatgttgtttttaactcagatgccataagaacaaagatacatgtaatttataatagtaatcattaatacctatattgtgctttaaggtttacaaaataatttttctcatactttatcttagtttagtttcttgacagtccatgaggtaaggtggtagctttatcaccattttacaaagtgggaaacgaaggttcctcttaggaacctagttgtcacctttgtataataaaacttcgaagctcggagctgttaactggtttgctgaaggcttagctgtaagagccagaattcagacccaggtctgagtgacttcaaactgcacagtccttcccattattacccatatgctatcccttatatttttaatttattaggaattcattcatttataaacttggtgattcacctttattagattctggtcgctgaaggctttagtaacttcagagtaaaacttgagagatgagatgtaaaatgcagccattcttgagagttcctttttctgtaacattcatcaacacttcattgagaagtgaaggttcctatggctgtctctaccttcaagaggcttagctttagtcactgagaaagacaaggaaactaatgatagaatatagtagcttcttctggcgttaggtatcacagagtcacagctagttacagctagccctttattattgaaagaagaggagctagcagtcccactatcagaattaagactagagatggtaataggagctagtatcagaaaagcttaaggcaaagcataaagtgtaggctagaatgaagctggagaatggggagggggcttgggtaacatccagaacctggctggggacctggaactacatgagatgtaagaatggagaggttctagcagtcagaggtcaggtacaaatgaacagctgggatctgcgcatggcagacagtgaaaaaacccaggcaagcaaaatggtcagagcagaaaggggcccaaggccacgttcttgagatgtggagggggctgaggaagccacgccaagtaaggacagatgcagctcagcagttcctagcgagccctgacaagccagctcagctgaagcttcgggtgggagccagtcatggcacagtggagtgaaggaagagcagtttcaggcacccaaaacctgacccccacgacctgttttccacctgaagagccacccattccatccaaacccttggcaaaagtctgctaacagagagaaccggccagtatgctggccagtcgcgatcatgcctgtctttaccctctaagctgaagctgctcatcaacggtgagatggcaaaaaggtgggtccagaagaggggaaaagaagggagtctgtgaaaacaaaatgctgaagaatctgcatcaaataaacccttccttccttcctttttccttca

SEQ ID NO: 316 - DNA, 1500 bp, Homo sapiens
gaagactggttggttgggtttggttagtcactaaactagcatatatcaaatgcttaccaggtctgacaaattcgttataaattccactttaaattctcaatgaaaatgagatagaaagcaaaaactaaggactggttaacaattccaaaacactttattctcacagcattctcagagttctgctctcctttagttatttttataactaaaagctgtggtggcactggggagattcaagtcagtgaagagagtcttggtgttgtcatctgtaaattaagagttgagcaaaggccgggtgcggtggctcacgcctgtaatcccaacactttgggaggccgaggcgggcagatcacctgaggtccggagttcgagaccagcctgaccaacatggagaaacccccgtctctactaaaaatacaaaattagccgagtgtggtggcgcatgcctgtaatcctagctactcgggaggctgaggcaggagaatcacttgaaccctggaggcggaggttgcagtaagctgagatcgcaccactgaattccagcctgggcaacaagagctaaactccgtctcaaaaaaaaaaaaaaaaaaaaaaagagttgagttagacagtttctcagccttttccagctccaaatgccataattctaagatggcaggctctggaattattcattcattcggtgcctaccataggccaggcactgttcttggtaactgggatacagcagtaaacaaaatatataaactccttaccttcacatagcttacattctagggagagaagacaataagtaaacacataaaatatatattgaattaaacggtagttaagagcaaaggtgaaaatgagaaaaaaaaggaaagggaaaacacgggaaaaaaaaataaaaacaaaagtaaaagctacgacatagtctttaacaccatgccaaaagggaataaggattgagactgtaggtaccggttcactgaaccctgggatgcggatccttggctggaacaactggtgcgcatgcgcactggtgtctcgcggcctggcgcgccccctccgaagcgcatgctcgtgggcacgcacgagcctcaagatccaaggtgcgcgcgtcggcgtccgaggcggttggtgtcggagaatttgttaagcgggactccaggtgactctgggggaagcacgcgacgaaaagatgatgccggggtctcttctaacaccagaagggccctgatgatggctgcgcgcagctttcggagccggatgcgcgagggccccggaggcccggcggcctggcggccgggcgggcccagtttggggacaaggacggggctggccagggaggggctgggcctggcgggaaggcagcgctgccccggactcggcccgcgcggccctcccaggcccccgtgccctggatccaggcccgtgcgtcccgtcagtcccaggcgctgggaggcgtcatcaggaaatcattgggtttacattaatcggaatacttgttaaacgttt

SEQ ID NO: 317 - DNA, 1153 bp, Homo sapiens
ggcggaggttgcagtaagctgagatcgcaccactgaattccagcctgggcaacaagagctaaactccgtctcaaaaaaaaaaaaaaaaaaaaaaagagttgagttagacagtttctcagccttttccagctccaaatgccataattctaagatggcaggctctggaattattcattcattcggtgcctaccataggccaggcactgttcttggtaactgggatacagcagtaaacaaaatatataaactccttaccttcacatagcttacattctagggagagaagacaataagtaaacacataaaatatatattgaattaaacggtagttaagagcaaaggtgaaaatgagaaaaaaaaggaaagggaaaacacgggaaaaaaaaataaaaacaaaagtaaaagctacgacatagtctttaacaccatgccaaaagggaataaggattgagactgtaggtaccggttcactgaaccctgggatgcggatccttggctggaacaactggtgcgcatgcgcactggtgtctcgcggcctggcgcgccccctccgaagcgcatgctcgtgggcacgcacgagcctcaagatccaaggtgcgcgcgtcggcgtccgaggcggttggtgtcggagaatttgttaagcgggactccaggtgactctgggggaagcacgcgacgaaaagatgatgccggggtctcttctaacaccagaagggccctgatgatggctgcgcgcagctttcggagccggatgcgcgagggccccggaggcccggcggcctggcggccgggcgggcccagtttggggacaaggacggggctggccagggaggggctgggcctggcgggaaggcagcgctgccccggactcggcccgcgcggccctcccaggcccccgtgccctggatccaggcccgtgcgtcccgtcagtcccaggcgctgggaggcgtcatcaggaaatcattgggtttacattaatcggaatacttgttaaacgtttacccgtcagttgctgccggctgcttagtgcattagcttagaaagcagcagaaattctgcagttaagagccctgatttgtcccgagtttggaaaaccggccccaccgcctgcaggggcccacccacgtggctctcactgatggagaagaagggg

SEQ ID NO: 318 - DNA, 4343 bp, Homo sapiens
tttgattcttaaaatttcttcctattgcttcaccttattacaatgtcttagcaattcattataagtatttttctaaaagtcatggttattgtgtaatgtataaatgttatgaaactagcttggacatttttgtcatgaataatttctagctaatgttccttagctgtatttaatttaggcatctgtttttggtgaagtggttagaatttcgaatactgtgtttactggtcaacttcaagtgtaattatgatttcactttaggacatgtgggatttagaaaggagcattgaaaattatgaaattatgaattttttttggatgttaatccattgcaccaagcatgagctgtgcctagagatcagcggtataactttgttttgctttgtttcacaatttggtttaataagagtgatttcatttacctcaagtgctatttcttcataatgctgtgtaatgctaaagctttgattatgtgcgtgtgtggtttttttctccaataggcaattatttccagtcagagaaggaaaccagtgcctggcattctcaccatctttctacctaccatgatcaagtgcttgtcagttgaagtacaagccaaattgcgttctggtttggccataagctccttgggccaatgtgttgaggaacttgccctcaacagtattgatgctgaagcaaaatgtgtggctgtcagggtgaatatggaaaccttccaagttcaagtgatagacaatggatttgggatggggagtgatgatgtagagaaagtgggaaatcgttatttcaccagtaaatgccactcggtacaggacttggagaatccaaggttttatggtttccgaggagaggccttggcaaatattgctgacatggccagtgctgtggaaatttcgtccaagaaaaacaggacaatgaaaacttttgtgaaactgtttcagagtggaaaagccctgaaagcttgtgaagctgatgtgactagagcaagcgctgggactactgtaacagtgtataacctattttaccagcttcctgtaaggaggaaatgcatggaccctagactggagtttgagaaggttaggcagagaatagaagctctctcactcatgcacccttccatttctttctctttgagaaatgatgtttctggttccatggttcttcagctccctaaaaccaaagacgtatgttcccgattttgtcaaatttatggattgggaaagtcccaaaagctaagagaaataagttttaaatataaagagtttgagcttagtggctatatcagctctgaagcacattacaacaagaatatgcagtttttgtttgtgaacaaaagactagttttaaggacaaagctacataaactcattgactttttattaaggaaagaaagtattatatgcaagccaaagaatggtcccaccagtaggcaaatgaattcaagtcttcggcaccggtctaccccagaactctatggcatatatgtaattaatgtgcagtgccaattctgtgagtatgatgtgtgcatggagccagccaaaactctgattgaatttcagaactgggacactctcttgttttgcattcaggaaggagtgaaaatgtttttaaagcaagaaaaattatttgtggaattatcaggtgaggatattaaggaatttagtgaagataatggttttagtttatttgatgctactcttcagaagcgtgtgacttccgatgagaggagcaatttccaggaagcatgtaataatattttagattcctatgagatgtttaatttgcagtcaaaagctgtgaaaagaaaaactactgcagaaaacgtaaacacacagagttctagggattcagaagctaccagaaaaaatacaaatgatgcatttttgtacatttatgaatcaggtggtccaggccatagcaaaatgacagagccatctttacaaaacaaagacagctcttgctcagaatcaaagatgttagaacaagagacaattgtagcatcagaagctggagaaaatgagaaacataaaaaatctttcctggaacatagctctttagaaaatccgtgtggaaccagtttagaaatgtttttaagcccttttcagacaccatgtcactttgaggagagtgggcaggatctagaaatatggaaagaaagtactactgttaatggcatggctgccaacatcttgaaaaataatagaattcagaatcaaccaaagagatttaaagatgctactgaagtgggatgccagcctctgccttttgcaacaacattatggggagtacatagtgctcagacagagaaagagaaaaaaaaagaatctagcaattgtggaagaagaaatgtttttagttatgggcgagttaaattatgttccactggctttataactcatgtagtacaaaatgaaaaaactaaatcaactgaaacagaacattcatttaaaaattatgttagacctggtcccacacgtgcccaagaaacatttggaaatagaacacgtcattcagttgaaactccagacatcaaagatttagccagcactttaagtaaagaatctggtcaattgcccaacaaaaaaaattgcagaacgaatataagttatgggctagagaatgaacctacagcaacttatacaatgttttctgcttttcaggaaggtagcaaaaaatcacaaacagattgcatattatctgatacatccccctctttcccctggtatagacacgtttccaatgatagtaggaaaacagataaattaattggtttctccaaaccaatcgtccgtaagaagctaagcttgagttcacagctaggatctttagagaagtttaagaggcaatatgggaaggttgaaaatcctctggatacagaagtagaggaaagtaatggagtcactaccaatctcagtcttcaagttgaacctgacattctgctgaaggacaagaaccgcttagagaactctgatgtttgtaaaatcactactatggagcatagtgattcagatagtagttgtcaaccagcaagccacatccttaactcagagaagtttccattctccaaggatgaagattgtttagaacaacagatgcctagtttgagagaaagtcctatgaccctgaaggagttatctctctttaatagaaaacctttggaccttgagaagtcatctgaatcactagcctctaaattatccagactgaagggttccgaaagagaaactcaaacaatggggatgatgagtcgttttaatgaacttccaaattcagattccagtaggaaagacagcaagttgtgcagtgtgttaacacaagatttttgtatgttatttaacaacaagcatgaaaaaacagagaatggtgtcatcccaacatcagattctgccacacaggataattcctttaataaaaatagtaaaacacattctaacagcaatacaacagagaactgtgtgatatcagaaactcctttggtattgccctataataattctaaagttaccggtaaagattcagatgttcttatcagagcctcagaacaacagataggaagtcttgactctcccagtggaatgttaatgaatccggtagaagatgccacaggtgaccaaaatggaatttgttttcagagtgaggaatctaaagcaagagcttgttctgaaactgaagagtcaaacacgtgttgttcagattggcagcggcatttcgatgtagccctgggaagaatggtttatgtcaacaaaatgactggactcagcacattcattgccccaactgaggacattcaggctgcttgtactaaagacctgacaactgtggctgtggatgttgtacttgagaatggtaagtacgtagtattcatgtgcatgagatgcttttgaagatgggaatgctggacaaggagtaagatcctcattatccaaagagattatctcaacagatagaacattttgaagaccacttataaaacatatgttgtattttcatgctatatgaagatttgctacgtccaacactacttttttttttttttttttttgagacggagtcttgctctgtcacccaggctggagtgcagtggtgcgatctcagctcactgcaacctctgcccccctggttcaagcgattctcctgcctcagcctccagtgtagcttggattacaagagcatgccaccatgcccagctaaatttttttattttcagtagagacaggatttcactatgttggccaggctggtctcaaactcctagcctcaagtgatccacctgcctcggcctcccagagtgttgggattataggtgtgagcccgcacgcagcctctaggtccaacactatttaaat

SEQ ID NO: 319 - DNA, 1099 bp, Homo sapiens
ggtgaaaccccatgtctactaaaaatacaaaaaaattagccgggtgtggtgacgcatgcctgtaatcccagctactcgggaggctgaggcaggagaattgcttgaacccgggaggcggaagttgcagtaagccgagatcacgccactgtactccagcccgggcgacagagcgagacgccgtctcaaaaaaaaaaaaaagggtctcaagacattgccaatgtcccctcgtgcaaaattgccccccagtgagaatcacagtgacctattctaggtcttcattctgtctggtatgaatagataatggaactaagcattaatatagagtcctatatggacagcataatttcattaaaggatttctgattctcaatctagtgtttagtagtctgctttatgtcttgactcagtttgtgcagaaagaggttttatgtgattaaatttttaaagagtttacttgtattttaagttcacatttctaggtttttctttcttatatttagggtctcagtacaggtgtcaaccttttagaagcgaccttgttcttcctttccttccgagagctcgagcagagaggactgtgatgagacaggataacagaggtaagggtggcagagagtgctggggcacacagtacacatcgtaccacctaactcaaaaaacaaagcaggcttgcattaagcttgatcagtgccagctgtgctgtactggaatcaggaattccccacggccctgtttaacagcggaactaattaattcagcgcatgcatttaggtcagaaattacttttccagacttgaggtcaatatttgctgattatgcatagtctgtggtgtcttgtgattaggggacatgtttcttatttttaaaaaggctggacttgcactccaagttgctgtagttttatgtaagcaaaactcttcaaaaaaagctacagacatcaattttgtgtgtatgtttaaaaatagataaggtatattttgcttaaaggcagtaaggctataaatttgagccatagcttctctgtcagtattccacaatatctcttttaacagtttggagaaaagctgtaatgccagaagatacagtcaccaactctagt

SEQ ID NO: 320 - DNA, 1086 bp, Homo sapiens
aattacttttccagacttgaggtcaatatttgctgattatgcatagtctgtggtgtcttgtgattaggggacatgtttcttatttttaaaaaggctggacttgcactccaagttgctgtagttttatgtaagcaaaactcttcaaaaaaagctacagacatcaattttgtgtgtatgtttaaaaatagataaggtatattttgcttaaaggcagtaaggctataaatttgagccatagcttctctgtcagtattccacaatatctcttttaacagtttggagaaaagctgtaatgccagaagatacagtcaccaactctagtttaaaaagtaacagatcaaaataatttagagatacagcaaacactgaacatttgtagaacatagaaacaatgtacgtgacctttggtcttgaggctatggctcaccaaacaggaaatgccattccctcctttccctgtggttctggatgccaactttacctgttcccttttgccctagatactgtggatgatactgttagtagcgaatcgcttcagtctttgttctcagaatgggacaatccagtatttgcccgttatccagaggtgggtctgtagcagtttttctttgccttttttttttcttcttcttcttcttattttttaaattttgagatggagttttgctcctgttgcccagactgaaatgcaatggcatgatctcggctcacgtaaccttcgcttcccaggttcaagcaattctcctgcctcagtctctcgagcagctgggattacaggcacctgccaccacgcccagcgaattttgtatttttagtagagatggggtttctccatattggtcaggctggtctctaactcccaacctcaggtgatctgcccgcctcagcctcccaaagtcctgggattacaggtgtgagccatcacgcccagcctttctttgcctgttattttaaactttgagtttcaagatgggtacagtggcatgcacttatagtctcagctactcaggaggctgaggtgggaggatcacttgaggccagaagttcaaggctatatagtgtgctgattgcacctgtgactagcca

SEQ ID NO: 321 - DNA, 1105 bp, Homo sapiens
gtaagactcattattcataaattcttttgaatttttttttttttttttttttttttttttttttttgtgacagagtcttgctgtgtcgcccaggctgaagtgcagtggcgtgatctcagctcactgcaagctccgcctcccgggttcacaccattctcctgcctcagtctcccaagtagctgggactaaaggcgcctgccgccacgcccagctaattttttgtattttttagtagagatggggtttcaccatgttagccaggatggtctcgatctcctgacctcgtgatctgcccgcctcagcctcccaaagtgctgagattacaggtgtgagccaccacgcccggccgattcttttgaatttctataaattccctgaattaaacccacctctagtaggctaaataaaaatgaatgcttttaaagcactctgatatctttggtaaaacaattctgacacaaaaattaaaatttcaattatattttgctgagtctttctaggttgctgttgatgtaagcagtggccaggctgagagcttagcagttaaaattcacaacatcttgtatccctatcgtttcaccaaaggaatgattcattcaatgcaggtaaaagattaacttcaaaatctcataaatatatatatatatatatatatatatatatatatatggcctaactcttctaaaatttgatttatttaatgatatagaccaccttggtcaaggcacgtgtgtgtgtgtgtgtgtgtgtgtgtgttcttactagaacttttatcatcagaagaaaaagcaagggattaattataattacaaagaaagaaatatctttagtagtgtaagtaggtttggagggaatgaattatggattcaggctgacagtttcaaggattctcaaggttctcctgcagaagattatatattgactttatatttggcaataatttataaatcaaagtcctttagtgaccttgtccttaagtgtgcaacagtgcccttttagaaattaccttctattgtgtgagcctacacaggtttgggaaagcccatattgagaagtcatttcacaaaagggaccctttgtctgatctgcttttctattttgcctt

SEQ ID NO: 322 - DNA, 1073 bp, Homo sapiens
gagccgagatcacaccattgcactccagcctgggtgacaaagtgagactccgtctcaaaaaaaaaaaaattaaaaataaataaaaataaaaatagactagtttctccataatcgttttccttgctttcatataaattttaaaaatttatttcagcctgtatgttagcaatctctggtcacattacctattctcaagagtcactctgttgggaacatctcaggccttctctaaagtattgctagcacaccactctgagacgtgggagtctgtcttcccctgtcgcctccctccccttacatcttctgatcaactccacctgcccattctttcatccttcctagtgactttttctggttcatcagaaccttacccagtctcaaagaaaggagtgtgataaggcaaacaactctaaataaaatacagttctgtatctttctatgcaaataagcctttgttaatttttatttagtgttgtaccacttatttgaatgtctgacaggttctccagcaagtagataacaagtttattgcctgtttgatgagcactaagactgaagagaatggcgaggcaggtaagaatggagtttagcctgaatgattaaccagctggtcttcttgtaacctttttttaatgattatttttggtatataatatagtttcaatgatttggatggattagggaaagccaatctaaaactaagaatattatgaaggctgggtgcggtggctcacacctgtaatcccaacactttgggaggtgaggcaggtggatggcttgaggccaggagttcaggaccagcctgagcaacatggcaaaaccccgtctctactaaaaatacaaaaattagctgggcatggtggtgtgcacctgtagtcccagctactcaggaggctaaggcacaagaatcgcttgaacttgggaggcagaggatgtagtgagccgagattgcgctattacactccagcctgggcgacagacatttagttttatgttcatacacatacatatactcaggatgcacattaaactatcaagagtatttactttgggagtgaaaatgagggtgtgca

SEQ ID NO: 323 - DNA, 1072 bp, Homo sapiens
gatttcttgacctcatgatccgcccgcctcagcctcccagtgtgctgggattacaggtgtgagacactgcacccagccctgactatgttttctaaatgagatgctggtgaactaaagagtttcttagtttaccttttgtttcctaaaaaatgaaattatggggaaaataataaaacttataggataaaaattagtaatactggtaatctctggagagagaaactagaaggggtgggggcaagagtataaaggagactttattaaattcccttttgtgcctttcagaattggatctgggattcaaacatatgggataagtttgctatcattttccccataatttcatgttttaggaaataaaagatacaattgttactcctcagaatgttttgtcttatgctgttgttagatagtttgaattaagtcttctctgtcctcaacacacatgatggttgtcgtcttgctctgagaatcaaagttcacaatccttgctcatctaggtgggaacctgctcgtgctggtggatcagcacgctgcccatgagcgtatacgtctggagcagcttatcattggtaaggatctgtttgcagccagaaaaaatttgagactcccagcagaatcagtacacctcaaagagcttttctaactgcaactgttgtgagaaagcacactttgtactgtatgttcaaaaattaaactaaagtcctgcagtttggcctgtgttataattgaaagaatgtggtagttcactaattgaaagatgtgaacttatttatgtggtcagaggcatatttgccagatgttattaacaacccagaagtacgcaaggataggctgcttactctgacatccagcacaaagctctgcccctccatatgcccggtgatcttggcatgccttcccacactccatcaggcagagaccagtggcagctcagaaggcccagtatgctgttttgattttaaaatttagtttgcttttgaatatgcagtataatcaaatagatccaattctgaaaggcacaaaagggaatataataaagtctcctttctatccttgtccccacccctcc

SEQ ID NO: 324 - DNA, 1112 bp, Homo sapiens
ttttcacttttccttataaaatgacggcctaagagttgggaaagatatagtaaaaacagtgttagaaaaacttacctctacaggccctgcaccatttgagaatagtactaattctctccagagactgggagaccctgctcaaggaaagggaagccttctggagccataagactgtgtggtcaacccacatatgttcctggtaatccacattattcacctctgtcatcaaaacaacatttattaactacaggaacattggcttgttcatctgaatgtaagatgcaagtcttatatttcttattttgaaaaatactaccaaaattgttaataggctgaatatttattagtttgactttaaaaatggaaatccaaaatctaaaactgaacattaaacattctgctttgcattagaatgattatctcaaggccgtgctttatttttatctgaatctagaagacttcccttcctactcttaacccattcatctttctgccaatagattcctacgagaagcaacaggcacaaggctctggtcggaaaaaattactgtcttctactctaattcctccgctagagataacagtgacagaggaacaaaggagactcttatggtcagtaccaccatgagaatgtgatgttgatggtatcaattctcacaataattctgtgaggaataagcataactattgttccatttctcagatgagaccaagagaggttacaagacttgtctaaggtcatagcagttattaagtagtggagcaggcactcaaaggcaggtcgtctgactccacaggctgtttgtttccttttttaaaatatatttttttctgcatccaatcatccattaaaatatttattttgtgagacatggtctcactctgttgtccaggctggagtgcagtggcacaatctctgctcactgcaacctccaccttccaggctcaagcagtcctcccacttcagcctcccaagtacctggaactacaggtgagcaccaccatgctggactaatttttgtaattttttggtagagatgggttttcgccatgttacccaggctggtctgaactcctaggctcaagcgatcctcccactttggcctcccaaa

SEQ ID NO: 325 - DNA, 1160 bp, Homo sapiens
ctcccaatatgtttcaggtttgggaatatgatactgccagtaaatctttttttccctatgacataatttatattagaggcagatctatttacttacatcccgttagtcaggacttctcaattccttgggctgttaattacctccctgctttaatgctgattcaaatcactctcagaccttttcttcatgccagactcccttaagtgccagcagccagaagttagcagttcctcaatgaagaaaacacacttagaaacaagacttagacacagattgattcccaatggaaaagagaaaaacaataaaggttactgtaattcaaaaaggaaatttgataataaaaaatcccaaacacccacacataagtgtgagaaaaacaatacggttgttaagccctgtggcagcttttgaaaaactattaagtagtatttggaaccagtagtgaagtgcaaatgaagtagcactctttttttttttaacatttgaggttatctctttaggtgttaccacaaaaatctggaagatctgggccttgaatttgtatttccagacactagtgattctctggtccttgtgggaaaagtaccactatgttttgtggaaagagaagccaatgaacttcggagaggaagatctactgtgaccaagagtattgtggaggtaagacacagctgcagatgttaaggaaattgctgagtgatggtaacctcatattttgtctgtagattctctgaattcatcttttcttcaacaagtattcatggtatttacctgcggtgtgccaggagctagaaattcagagatgagttagctcaaaataaggaagaagggcatttaaagaattatagtcagtgaactttggctagtagaggtatgtgttttgctttcttcccagtgataaaggtaatgaaaactaagagtctagaatgcaccaagatagtttttcagaagtgttatggaaacacagaatgacttgtgtgcctggggaggtgaagtcaatgaaaatgtcacagaaaagctgttttcttaagaaaagtttttacttttgagagaccaggtctcactctgttgcccaagctggagtgcagtggtgcaatcatagctcactgtagccttgatctcctgggcacaagcaatcttcctgcctcagcctcccaagt

SEQ ID NO: 326 - DNA, 1024 bp, Homo sapiens
ccaaaaagcccgtgggaactaaagtgactgtttacttatgtttatgatatttaagcaagtgttatactgagcagtggttgtgttgatggttgttgtgtatttattctcagtttgtgtgtaatattacgcttgttctggctaagattacacacacaaacagacagccttttagtgagaagccttcctgatgttttgaattggttgaatcatcaaggctactctcaccagctacataacctcattagttgagaagctatctctggaggaagtctcagtagctaaatatattctgtgttcaataagagttctattcagttgcttggttttttcatattcaaagtgccttacaacaaataaatttgtacccaagtgctgtattgctggaactctttctttcaggaggcatgatttaaagaagaaaattgagatattttgtaaactatcaaagggcaagtaaaacataaccgtagattaaagccgattttccttttgctttgcaggaatttatccgagaacaactggaggtaagcttttcctttattttggggtttcacacagaagcaccacacataaaaggcttcgttgttccgttttcttttcctgttaataacgtgtttatgcattagctactccagaccaccggaggcatccaagggacattgccactgactgtccagaaggtgttggcatcccaagcctgccatggtaagcccttcaacatagcagtgatcaaacacctctgcatgcagagccctggcagggctgccgggattacaaaagaggcagagggtacatttactacttgactcttggagaatacaatttagatcaagaaactgaatatacccttttaaaaatcacttttacaaaaacaaaatcccaacacaaaaatttgactatagtgctgcctgacctatatgagtggaggaataactcctagaggagatgcattttgagatgaattttgaatgagctggggaacatgggttcatagcatggaaaggggaattcactatagggagag

SEQ ID NO: 327 - DNA, 1079 bp, Homo sapiens
cgcttgttctggctaagattacacacacaaacagacagccttttagtgagaagccttcctgatgttttgaattggttgaatcatcaaggctactctcaccagctacataacctcattagttgagaagctatctctggaggaagtctcagtagctaaatatattctgtgttcaataagagttctattcagttgcttggttttttcatattcaaagtgccttacaacaaataaatttgtacccaagtgctgtattgctggaactctttctttcaggaggcatgatttaaagaagaaaattgagatattttgtaaactatcaaagggcaagtaaaacataaccgtagattaaagccgattttccttttgctttgcaggaatttatccgagaacaactggaggtaagcttttcctttattttggggtttcacacagaagcaccacacataaaaggcttcgttgttccgttttcttttcctgttaataacgtgtttatgcattagctactccagaccaccggaggcatccaagggacattgccactgactgtccagaaggtgttggcatcccaagcctgccatggtaagcccttcaacatagcagtgatcaaacacctctgcatgcagagccctggcagggctgccgggattacaaaagaggcagagggtacatttactacttgactcttggagaatacaatttagatcaagaaactgaatatacccttttaaaaatcacttttacaaaaacaaaatcccaacacaaaaatttgactatagtgctgcctgacctatatgagtggaggaataactcctagaggagatgcattttgagatgaattttgaatgagctggggaacatgggttcatagcatggaaaggggaattcactatagggagagtaaacagcctgtgcagagaggcagaacagaaacaagttagttatatgagaagcagcaaagagtatcaagaaactaggcaggtaagagaacagaaacctagaaggtcacagcaaaacctttggatttgatacagaaggcattagaattagcaagcgttctttttttatctttccaactttca

SEQ ID NO: 328 - DNA, 1152 bp, Homo sapiens
agccttagtttcatccatggtcataagcactaatttatttccctctttttttttttttttttttttttttgagaacggagtctcgctttgttgcccaggctggagtgcagtggcgtgatctcggctcactgcaacccccgcctcctgggttcaagtgattcttctgcctcagcctcccaagtagctgggactataggcgcgtgccaccacacccggctaatttttgtatttttagtagaggcgggatttcaccatattggccaggctggtcttgaactcctgacctcatgatctgcccgcctcagcctcccaaagtgctgggattacaggtgtgagacaccatgcccggcctataagcaccaatttcaagcaggattaaagcttcattaaagaagcctaagaaacatgttactttttccagatatttggcagtgacccaaggtcagcattggtttcccactatatacactataaccttcttgtttctgtctttcatttaggggccattaagtttaatgatggcctgagcttacaggaaagttgccgccttattgaagctctgtcctcatgccagctgccattccagtgtgctcacgggagaccttctatgctgccgttagctgacatagaccacttggaacaggaaaaacaggtacattaatgactaacaggagcaggagggagcaaagtttattttctctttcttttctggcttttactatgcaactgtaatctgtcttaacctttccaaaataggagagttttgcaaaatctgcactggaagtttcacataaagcctcacccatttcattttccagctcaaatccaaaatggaacttagactgaactgtcaggtcacctacataatggctttgtattttaaaacttaacacatgtacagacttatgtaccctgaatatctattgcctgctggctctaggtttcataatatgcagttctttctgaagctactgaaagttggtagaagcacagcaaattcactgttggcaatatagagcctcaacttccagtttcttgatagtacctgctggaaacggtgatctgtgactgtagctggccatccccaaggatcttgagttatggtttgaggatcatcagacagggacccaagcttggggatctctacattat

SEQ ID NO: 329 - DNA, 4438 bp, Homo sapiens
gctgagagctgggaatctagacttaaagttctgagtccccttggatccttaaaacaatctgtaatctctattgaatccagaagttagaaatctaaacagattataacagccagactttggaaatatttgtatgctacctacattttcaattttttttttttgagacggagtctcactctgtcgcccaggctggagtgcagtggcatgatcttggctcaccacaacctccgcctcccaggttcaatcaattctcctgcctcagcctcctgagtagctgggattataggcatgcgccaccacacccggctaatttttttttgtatttttagtagagacagggtttcaccatattggccaggctggtctcaaactcctgaccttgtgatccgcctgccttggcctcccagagtgctgggattacaggtgtgagtcacctcgcccagcctgtatgctacctaccttttcatattgctaattgaagttattctttcttcccatagattaaacccaacctcactaaacttcgcaaaatggcccaggcctggcgtctctttggaaaagcagagtgtgatacaaggcagagcctgcagcaatccatgcctccctgtgagccaccatgagaacagaatcactggtctaaaaggaacaaagggatgttcactgtatgcctctgagcagagagcagcagcagcaggtaccagcacggccctgactgaatcagcccagtgtccctgagcagcttagacagcagggctctctgtatcagtctttcttgagcagatgattcccctagttgagtagccagatgaaattcaagcctaaagacaattcattcatttgcatccatgggcacagaaggttgctatatagtatctaccttttgctacttatttaatgataaaatttaatgacagtttgattggttgcttggtttgttatttgaagggtgtgatttttgtttttgtacagttttttttcaagcttcacatttgcgtgtatctaattcagctgatgctcaagtccaaggggtagtctgccttcccaggctgcccccagggtttctgcactggtcccctcttttcccttcagtcttcttcacttccctatgctgctgcttcatgtgctacatctcagacttaaagagtttctctactacagtgaaaacattctctagggtctttcatcaggcctttagttattttagggataaaaactattgataaaaaggacaaggatagaacagagaaaatttaaagtcctgttccgggttttttgttatgttttctttaaaaactcagagactgatgttcaatatcccaaaccagtaaaatggtgaaaatactatgagcttgttttttaaaatatgattttttttggtactttataaagtatctctttatgtgaaagcaattgtcatatcaaaacacagcatacatacgttcaacctaaccaaatatctttacactttttctttcaggagacaagggttctttgggtccctttcaaacggtatcttggtgttattacattatgcctatctattgcccttataatatcacttgggaccaggactgatcgttctgcaaatgcttgttatgccattctcaatctatttttcccgcaccttttcacatgatttgtggttaataggactcaacagactaaaattgcatagtagaaaaaaaatgcaaaaagccagctggtaatgtttattgcaactggggtgctatacaattagtaagatgatgcaatgagaatttctacttttgtatttcctgaccagcctgctcaaagtggcttttatatcaattgaatgattttcctcattttttaatacaggaaaccaattcgtgctcatggaagaaaagttcctttgccagcagccttgaagtgaatcttacaggagcaatgaaagtattgcattcattagcgtctgccccagagaaggttcagagaaaaccttcacttgttttcaaggggatccttgtagatttacgtaattggaatcctgaagaacaggccctactgtctaaaaaatggcttttattcttctaaatacatataaacggatgttttatagatgggaagacatgaccttagaaaggagagagttttcagaggatttgccaggctgtcaggggctctgcctccaggcccagtgtggcagtgtggcctcagggcctccgcctccctgcttgagggctgcatggaggccaactgtcctgggagttgtaaaaatcttttaaggccagaccaatttgagggattttaaaaagtgtctcagtgcctcttatgatttcagaaggttttgctatatgtaatcccaactactgttttcttgagagtagcagaggattagaaaaagtcctccataaattatgtaaccggccttcctgactagcctgactcaagcaatgtaagagataattattctgttttcataatttataagtgtgggggcatgcctcagcataaaaacaacctattagggaaaaatatctaatagattacctttatcgcctgttagggttttatgttgtttttaactcagatgccataagaacaaagatacatgtaatttataatagtaatcattaatacctatattgtgctttaaggtttacaaaataatttttctcatactttatcttagtttagtttcttgacagtccatgaggtaaggtggtagctttatcaccattttacaaagtgggaaacgaaggttcctcttaggaacctagttgtcacctttgtataataaaacttcgaagctcggagctgttaactggtttgctgaaggcttagctgtaagagccagaattcagacccaggtctgagtgacttcaaactgcacagtccttcccattattacccatatgctatcccttatatttttaatttattaggaattcattcatttataaacttggtgattcacctttattagattctggtcgctgaaggctttagtaacttcagagtaaaacttgagagatgagatgtaaaatgcagccattcttgagagttcctttttctgtaacattcatcaacacttcattgagaagtgaaggttcctatggctgtctctaccttcaagaggcttagctttagtcactgagaaagacaaggaaactaatgatagaatatagtagcttcttctggcgttaggtatcacagagtcacagctagttacagctagccctttattattgaaagaagaggagctagcagtcccactatcagaattaagactagagatggtaataggagctagtatcagaaaagcttaaggcaaagcataaagtgtaggctagaatgaagctggagaatggggagggggcttgggtaacatccagaacctggctggggacctggaactacatgagatgtaagaatggagaggttctagcagtcagaggtcaggtacaaatgaacagctgggatctgcgcatggcagacagtgaaaaaacccaggcaagcaaaatggtcagagcagaaaggggcccaaggccacgttcttgagatgtggagggggctgaggaagccacgccaagtaaggacagatgcagctcagcagttcctagcgagccctgacaagccagctcagctgaagcttcgggtgggagccagtcatggcacagtggagtgaaggaagagcagtttcaggcacccaaaacctgacccccacgacctgttttccacctgaagagccacccattccatccaaacccttggcaaaagtctgctaacagagagaaccggccagtatgctggccagtcgcgatcatgcctgtctttaccctctaagctgaagctgctcatcaacggtgagatggcaaaaaggtgggtccagaagaggggaaaagaagggagtctgtgaaaacaaaatgctgaagaatctgcatcaaataaacccttccttccttcctttttccttccatccctctcttcattcagcaaatcttcagtgagttcctttctaaatgtattgtatcagaacttgtgggggatataaagaaaaaaaagaggttatcacatggcttaggatgtttccaacccttggatcattttcaccccaggcccattagttacagagcactcagtcttacccagaagcatcggatatagtccaggcaaccggatccaagcgtgtgggaatcgcagtgtgctgcatgtgggaatctatcaggccaggatgattcaagcagcagcctgcagaagtgggatttggccagccttgcctgactctggccttccaacttgctcttatctacttccaaagtaaggaatgccccatgatgggccgagcagtccaaaaaaagtggcttggagttagctaccgcaattagcagtttctcattattcaacactgcattacctctttttcatattaactgcagaattttatttttatgtatttattatccttccaaaccca

SEQ ID NO: 330 - DNA, 1500 bp, Homo sapiens
tgggatctgcgcatggcagacagtgaaaaaacccaggcaagcaaaatggtcagagcagaaaggggcccaaggccacgttcttgagatgtggagggggctgaggaagccacgccaagtaaggacagatgcagctcagcagttcctagcgagccctgacaagccagctcagctgaagcttcgggtgggagccagtcatggcacagtggagtgaaggaagagcagtttcaggcacccaaaacctgacccccacgacctgttttccacctgaagagccacccattccatccaaacccttggcaaaagtctgctaacagagagaaccggccagtatgctggccagtcgcgatcatgcctgtctttaccctctaagctgaagctgctcatcaacggtgagatggcaaaaaggtgggtccagaagaggggaaaagaagggagtctgtgaaaacaaaatgctgaagaatctgcatcaaataaacccttccttccttcctttttccttccatccctctcttcattcagcaaatcttcagtgagttcctttctaaatgtattgtatcagaacttgtgggggatataaagaaaaaaaagaggttatcacatggcttaggatgtttccaacccttggatcattttcaccccaggcccattagttacagagcactcagtcttacccagaagcatcggatatagtccaggcaaccggatccaagcgtgtgggaatcgcagtgtgctgcatgtgggaatctatcaggccaggatgattcaagcagcagcctgcagaagtgggatttggccagccttgcctgactctggccttccaacttgctcttatctacttccaaagtaaggaatgccccatgatgggccgagcagtccaaaaaaagtggcttggagttagctaccgcaattagcagtttctcattattcaacactgcattacctctttttcatattaactgcagaattttatttttatgtatttattatccttccaaacccagtgttgtaggaagaatattacatataaatgataacttaggaatcttgtcaagtttttgtttcttcagcactaagtagcttattttctaggcaggtcttaattctaaatgtaacatgcttgaaaaaaacactattgaaaggatccgtctcttcagcatagtatttaatatacatatcaggcaatcaccatctcaagcatgattagactcaagtgctgccctccatcgtgtgagggatgctgggagactggaagcttagactttagctctttaagttggtgcaaaagcaattgcagtttttactattaataataataattgcctagccattgtgcagtaccttgcaagagctctttggcaaatgaaagaataattcaaagcaaagtaggccagatataaaacacttccaaatcacatttcaaaattgttctttcatgtcaactaggtgcatgtctgctaagggagtttttgcaaggacaggtggatagtgtgaggcctttac

SEQ ID NO: 331 - DNA, 5135 bp, Homo sapiens
acgttatccatgaagtgtcgcgagagaaacggacgccgttctctcccgcggaattcaggtttacggccctgcgggttctcagagaatttctagaatttggaatcgagtgcattttctgacatttgagtacagtacccaggggttcttggagaagaacctggtcccagaggagcttgactgaccataaaaatgagtactgcagatgcacttgatgatgaaaacacatttaaaatattagttgcaacagatattcatcttggatttatggagaaagatgcagtcagaggaaatgatacgtttgtaacactcgatgaaattttaagacttgcccaggaaaatgaagtggattttattttgttaggtggtgatctttttcatgaaaataagccctcaaggaaaacattacatacctgcctcgagttattaagaaaatattgtatgggtgatcggcctgtccagtttgaaattctcagtgatcagtcagtcaactttggttttagtaagtttccatgggtgaactatcaagatggcaacctcaacatttcaattccagtgtttagtattcatggcaatcatgacgatcccacaggggcagatgcactttgtgccttggacattttaagttgtgctggatttgtaaatcactttggacgttcaatgtctgtggagaagatagacattagtccggttttgcttcaaaaaggaagcacaaagattgcgctatatggtttaggatccattccagatgaaaggctctatcgaatgtttgtcaataaaaaagtaacaatgttgagaccaaaggaagatgagaactcttggtttaacttatttgtgattcatcagaacaggagtaaacatggaagtactaacttcattccagaacaatttttggatgacttcattgatcttgttatctggggccatgaacatgagtgtaaaatagctccaaccaaaaatgaacaacagctgttttatatctcacaacctggaagctcagtggttacttctctttccccaggagaagctgtaaagaaacatgttggtttgctgcgtattaaagggaggaagatgaatatgcataaaattcctcttcacacagtgcggcagtttttcatggaggatattgttctagctaatcatccagacatttttaacccagataatcctaaagtaacccaagccatacaaagcttctgtttggagaagattgaagaaatgcttgaaaatgctgaacgggaacgtctgggtaattctcaccagccagagaagcctcttgtacgactgcgagtggactatagtggaggttttgaacctttcagtgttcttcgctttagccagaaatttgtggatcgggtagctaatccaaaagacattatccattttttcaggcatagagaacaaaaggaaaaaacaggagaagagatcaactttgggaaacttatcacaaagccttcagaaggaacaactttaagggtagaagatcttgtaaaacagtactttcaaaccgcagagaagaatgtgcagctctcactgctaacagaaagagggatgggtgaagcagtacaagaatttgtggacaaggaggagaaagatgccattgaggaattagtgaaataccagttggaaaaaacacagcgatttcttaaagaacgtcatattgatgccctcgaagacaaaatcgatgaggaggtacgtcgtttcagagaaaccagacaaaaaaatactaatgaagaagatgatgaagtccgtgaggctatgaccagggccagagcactcagatctcagtcagaggagtctgcttctgcctttagtgctgatgaccttatgagtatagatttagcagaacagatggctaatgactctgatgatagcatctcagcagcaaccaacaaaggaagaggccgaggaagaggtcgaagaggtggaagagggcagaattcagcatcgagaggagggtctcaaagaggaagagcagacactggtctggagacttctacccgtagcaggaactcaaagactgctgtgtcagcatctagaaatatgtctattatagatgcctttaaatctacaagacagcagccttcccgaaatgtcactactaagaattattcagaggtgattgaggtagatgaatcagatgtggaagaagacatttttcctaccacttcaaagacagatcaaaggtggtccagcacatcatccagcaaaatcatgtcccagagtcaagtatcgaaaggggttgattttgaatcaagtgaggatgatgatgatgatccttttatgaacactagttctttaagaagaaatagaagataatatatttaatggcactgagaaacatgcaagatacaggaaaaatgaaaatgttacaagctaagagtttacagtttaagattttaagtattgtttcctgagcataactccataagtaagaaatttctagttcacagacatacaatagcattgattcaccttgtttttttaacctggttgttgtagtaagagctttgtttcaatatcactcttgagtaaagattaaaataaagctaccattttacatttctatttcataatgaaaaactatgtcagtattttaatatggttacatttagccaaagttgagggaaagagcttataaaatttaacttcttcataattttagtaatttcctagaggttctgggttttctgaaagtaaaacaatttatgcgaacctatgtctaaattcactgtttgttactatgtatgtttttttccaatgcttcttataagactaaatgattagaagtacctaatagtttgaacagatatgtttttatttaaaagagtagaataacctttcagaattactgagttttttattccagttgtagcaaagatttcaaaagattgtgttcccattaagtggtagtaatttcctttattattctgtatccttaatggtgttctctctctctctctctctctctctctctccctctcccccccgttccccactcttcctttctcctttgctttttcttctctttcatacatatatgcgtgcctagttctaggaggaaacgggttaaaaattgttttaaactacatcttgaaaatattgaagaatttgttttaggtagagtggtcagttgaaccttacagtaaagtatagaaatatatttaatgtggaatgtcaatgccaggatttctcattaacaatattttatctcaactttggttcctgtgatacatttctgaatgggcaattccagaaatcttagtagcccatgttaagcttctattttttacttgttttcggggagaaataagaattagacatcttcagatttaagttaaataatcccattctttataatcctctgtaaaaagatccctgagattattccttcttctagttttatgcgacagctttactttaaaattcaagttatacatcttgggagtacaatggcccgacatttcttcataggtagaaacaaatacttgactcagtgatactcatgaccattagaatagtcatacctggaatgtgtcaaattataagagacagacacttggttagtggctgcctcatatagcacttttgaagaggcctaagtcaaaacttgcaatataacattctattgactttcttaaaaatattttttctgtacctaacttgagcataagggttatttgagcaagtaacattaactcagtggaaggcattgtcctgtgaaatattcttaggcagatctgcccacatctttattgaacttgaaatctaatatttctagtatttgaacaaagcagaaggttaagtcagggaagagcagtgctgtccatgatgtaatggaagctaccaggggaggcagtgtctggatgatgctgtgctacctacccctgcacaagccatgctggctcagtctgagctgtgggccacatcagctagtggctcttctcatgcatcagttaggtgggtctgggtgagagttatagtgagggaatggtcactaaagtatcctgacaagttcctaggaaaaaaggaataaagtttttttccttaaaaaaaaaaaaattgctcttggctgtgaaaagaggtactaaatgcgattcagttcaccgctaaggaaagtgatgacatagcagttacagagggtgataaatctctccagctaattcaggtcattttgtgaatactatgtatcaagccctgaaaatatggtaaataaaacgtgacagggaaacctttttttgattgaatattgttacatagttaaatgtgctatatatccttaatattttatattgatcctgcaaaatctgttggttttaggggagttttgttttttgtttctaacaattttcagacctgttggtataggaatgtagaagtctttcagatgatttgaaagcagctgcatttgctcttggaggctttgggagagcaggaatgaaaacattcagaggaagacatctgtagggaattcttctgttacttaccaaagaataagtgtctttctggtgttttatttcctatcataaaaatacaacagtgcatttacaaggttaaagattcctcgaagttctaggaaattcttgaaaatataagtggtgcttagaaaattcaagcatttaggaatgtgacctttaattcaggtatgtaaaagacttttttcccaaacttttaaaagtaggaaatacaataaatacagaaaagtcatatggttgaataaataattataaattgagcactgatggaatccctctacaggtcaagaaatagcgcagtgtcctggatgcccattatattgttttctcctttctgggtaacaagccctaacttctgtaatttaaaagctcctacttttgccacaaggtggtgcttctgccattagacgcagttaggaggatgcaactgcaaatctaaaattacgaagttagtgtagttgcaataaacttagaacatatgcattaatactaaacctatgcagtaataccataattagccttctaatcatgtaatttgctttacttaggtatttcatttggttcagcctgttatggaatttaccagcttgataaatttgcctataaagttttataaagaaaaggaatattttgttttcataaagaggaaaatccattcttaga

SEQ ID NO: 332 - DNA, 5158 bp, Homo sapiens
acgttatccatgaagtgtcgcgagagaaacggacgccgttctctcccgcggaattcaggtttacggccctgcgggttctcagaggcaagttcagaccgtgttgttttcttttcacggatcctgccctttcttcccgaaaagaagacagccttgggtcgcgattgtggggcttcgaagagtccagcagtgggaatttctagaatttggaatcgagtgcattttctgacatttgagtacagtacccaggggttcttggagaagaacctggtcccagaggagcttgactgaccataaaaatgagtactgcagatgcacttgatgatgaaaacacatttaaaatattagttgcaacagatattcatcttggatttatggagaaagatgcagtcagaggaaatgatacgtttgtaacactcgatgaaattttaagacttgcccaggaaaatgaagtggattttattttgttaggtggtgatctttttcatgaaaataagccctcaaggaaaacattacatacctgcctcgagttattaagaaaatattgtatgggtgatcggcctgtccagtttgaaattctcagtgatcagtcagtcaactttggttttagtaagtttccatgggtgaactatcaagatggcaacctcaacatttcaattccagtgtttagtattcatggcaatcatgacgatcccacaggggcagatgcactttgtgccttggacattttaagttgtgctggatttgtaaatcactttggacgttcaatgtctgtggagaagatagacattagtccggttttgcttcaaaaaggaagcacaaagattgcgctatatggtttaggatccattccagatgaaaggctctatcgaatgtttgtcaataaaaaagtaacaatgttgagaccaaaggaagatgagaactcttggtttaacttatttgtgattcatcagaacaggagtaaacatggaagtactaacttcattccagaacaatttttggatgacttcattgatcttgttatctggggccatgaacatgagtgtaaaatagctccaaccaaaaatgaacaacagctgttttatatctcacaacctggaagctcagtggttacttctctttccccaggagaagctgtaaagaaacatgttggtttgctgcgtattaaagggaggaagatgaatatgcataaaattcctcttcacacagtgcggcagtttttcatggaggatattgttctagctaatcatccagacatttttaacccagataatcctaaagtaacccaagccatacaaagcttctgtttggagaagattgaagaaatgcttgaaaatgctgaacgggaacgtctgggtaattctcaccagccagagaagcctcttgtacgactgcgagtggactatagtggaggttttgaacctttcagtgttcttcgctttagccagaaatttgtggatcgggtagctaatccaaaagacattatccattttttcaggcatagagaacaaaaggaaaaaacaggagaagagatcaactttgggaaacttatcacaaagccttcagaaggaacaactttaagggtagaagatcttgtaaaacagtactttcaaaccgcagagaagaatgtgcagctctcactgctaacagaaagagggatgggtgaagcagtacaagaatttgtggacaaggaggagaaagatgccattgaggaattagtgaaataccagttggaaaaaacacagcgatttcttaaagaacgtcatattgatgccctcgaagacaaaatcgatgaggaggtacgtcgtttcagagaaaccagacaaaaaaatactaatgaagaagatgatgaagtccgtgaggctatgaccagggccagagcactcagatctcagtcagaggagtctgcttctgcctttagtgctgatgaccttatgagtatagatttagcagaacagatggctaatgactctgatgatagcatctcagcagcaaccaacaaaggaagaggccgaggaagaggtcgaagaggtggaagagggcagaattcagcatcgagaggagggtctcaaagaggaagagcctttaaatctacaagacagcagccttcccgaaatgtcactactaagaattattcagaggtgattgaggtagatgaatcagatgtggaagaagacatttttcctaccacttcaaagacagatcaaaggtggtccagcacatcatccagcaaaatcatgtcccagagtcaagtatcgaaaggggttgattttgaatcaagtgaggatgatgatgatgatccttttatgaacactagttctttaagaagaaatagaagataatatatttaatggcactgagaaacatgcaagatacaggaaaaatgaaaatgttacaagctaagagtttacagtttaagattttaagtattgtttcctgagcataactccataagtaagaaatttctagttcacagacatacaatagcattgattcaccttgtttttttaacctggttgttgtagtaagagctttgtttcaatatcactcttgagtaaagattaaaataaagctaccattttacatttctatttcataatgaaaaactatgtcagtattttaatatggttacatttagccaaagttgagggaaagagcttataaaatttaacttcttcataattttagtaatttcctagaggttctgggttttctgaaagtaaaacaatttatgcgaacctatgtctaaattcactgtttgttactatgtatgtttttttccaatgcttcttataagactaaatgattagaagtacctaatagtttgaacagatatgtttttatttaaaagagtagaataacctttcagaattactgagttttttattccagttgtagcaaagatttcaaaagattgtgttcccattaagtggtagtaatttcctttattattctgtatccttaatggtgttctctctctctctctctctctctctctctccctctcccccccgttccccactcttcctttctcctttgctttttcttctctttcatacatatatgcgtgcctagttctaggaggaaacgggttaaaaattgttttaaactacatcttgaaaatattgaagaatttgttttaggtagagtggtcagttgaaccttacagtaaagtatagaaatatatttaatgtggaatgtcaatgccaggatttctcattaacaatattttatctcaactttggttcctgtgatacatttctgaatgggcaattccagaaatcttagtagcccatgttaagcttctattttttacttgttttcggggagaaataagaattagacatcttcagatttaagttaaataatcccattctttataatcctctgtaaaaagatccctgagattattccttcttctagttttatgcgacagctttactttaaaattcaagttatacatcttgggagtacaatggcccgacatttcttcataggtagaaacaaatacttgactcagtgatactcatgaccattagaatagtcatacctggaatgtgtcaaattataagagacagacacttggttagtggctgcctcatatagcacttttgaagaggcctaagtcaaaacttgcaatataacattctattgactttcttaaaaatattttttctgtacctaacttgagcataagggttatttgagcaagtaacattaactcagtggaaggcattgtcctgtgaaatattcttaggcagatctgcccacatctttattgaacttgaaatctaatatttctagtatttgaacaaagcagaaggttaagtcagggaagagcagtgctgtccatgatgtaatggaagctaccaggggaggcagtgtctggatgatgctgtgctacctacccctgcacaagccatgctggctcagtctgagctgtgggccacatcagctagtggctcttctcatgcatcagttaggtgggtctgggtgagagttatagtgagggaatggtcactaaagtatcctgacaagttcctaggaaaaaaggaataaagtttttttccttaaaaaaaaaaaaattgctcttggctgtgaaaagaggtactaaatgcgattcagttcaccgctaaggaaagtgatgacatagcagttacagagggtgataaatctctccagctaattcaggtcattttgtgaatactatgtatcaagccctgaaaatatggtaaataaaacgtgacagggaaacctttttttgattgaatattgttacatagttaaatgtgctatatatccttaatattttatattgatcctgcaaaatctgttggttttaggggagttttgttttttgtttctaacaattttcagacctgttggtataggaatgtagaagtctttcagatgatttgaaagcagctgcatttgctcttggaggctttgggagagcaggaatgaaaacattcagaggaagacatctgtagggaattcttctgttacttaccaaagaataagtgtctttctggtgttttatttcctatcataaaaatacaacagtgcatttacaaggttaaagattcctcgaagttctaggaaattcttgaaaatataagtggtgcttagaaaattcaagcatttaggaatgtgacctttaattcaggtatgtaaaagacttttttcccaaacttttaaaagtaggaaatacaataaatacagaaaagtcatatggttgaataaataattataaattgagcactgatggaatccctctacaggtcaagaaatagcgcagtgtcctggatgcccattatattgttttctcctttctgggtaacaagccctaacttctgtaatttaaaagctcctacttttgccacaaggtggtgcttctgccattagacgcagttaggaggatgcaactgcaaatctaaaattacgaagttagtgtagttgcaataaacttagaacatatgcattaatactaaacctatgcagtaataccataattagccttctaatcatgtaatttgctttacttaggtatttcatttggttcagcctgttatggaatttaccagcttgataaatttgcctataaagttttataaagaaaaggaatattttgttttcataaagaggaaaatccattcttaga

SEQ ID NO: 333 - DNA, 1500 bp, Homo sapiens
agatgctaataaataaaagttcacttgtaattatatcaaatatagtaaccttataccacagatcttaccctctcccccaacatgcttttcctttcaataaaaactccctttatataaattttgagtttacagatccagatacaaaaaattatgtacaaaattttactggtatatttagtttaaaaagccaagcctaggcgcatctacccgacttacagttaagaaacaaaactgatgacttgatgatgatattcctgatattccatcaggaatgtcagggtatgtttcctaacttaaagggcatatcctattttgagagagatccgaactatgtcaactccttacaaacaactcagtgataggcggggctataaaccttactggtgaaggaggttcagatagattaaaacaacttgccctagatcaaggacccttcaatggaactgaaagggcagacgttctaattcaaaagttctacattatttttcgctgcactatacatcttactgctctcagcacaaagcagtgcagatgtgctgaactcaaggacctaggggcgacacctgtagagggtctggcgactgggagggagggagaggggatccagctccggcactctgccaccagccgggagctcacaggcccgtgagctccgcctgcggccttccaaacagccaagagcggagaagcggcttcggtcctacctggggaccacgaagcggcctgacctgcagggctcggcctgtgtccacaggctacccacccccacgggctcaggagttcttagatggcgccggtccatcaaaaagcgaggtccgggacagggaataacaacccacctgacagaagggaaaatcgccgccttgcatctcacttccgggttcgtctcctagcctgctcaggattggctcctgcgtgagggcggggcctcgccgctactttccccgccccctcactgcgtgcggtagccaatgagagccgaactggacttgaagcatctacgttatccatgaagtgtcgcgagagaaacggacgccgttctctcccgcggaattcaggtttacggccctgcgggttctcagaggcaagttcagaccgtgttgttttcttttcacggatcctgccctttcttcccgaaaagaagacagccttgggtcgcgattgtggggcttcgaagagtccagcagtggggtaatttaggaatcgcattcgtctcctgtttctgcaggttcccaggcggaagcccagagttaactggaacctcgggaagagcgggccgagtgggcaggggaggggtcctggcgggctcagcgttctgattccgaggttccctgcggtgagggcgtgttgaggcttggaatcccgacggaatctggagctccagatgtggtgggggttgtctcgcggtggcagccactcttccccaaacctggctattttcagtcatcctgctggtgcttaaaggtgttcctccgcagaccacgtgtttgtttatttaca

SEQ ID NO: 334 - DNA, 1084 bp, Homo sapiens
atcttactgctctcagcacaaagcagtgcagatgtgctgaactcaaggacctaggggcgacacctgtagagggtctggcgactgggagggagggagaggggatccagctccggcactctgccaccagccgggagctcacaggcccgtgagctccgcctgcggccttccaaacagccaagagcggagaagcggcttcggtcctacctggggaccacgaagcggcctgacctgcagggctcggcctgtgtccacaggctacccacccccacgggctcaggagttcttagatggcgccggtccatcaaaaagcgaggtccgggacagggaataacaacccacctgacagaagggaaaatcgccgccttgcatctcacttccgggttcgtctcctagcctgctcaggattggctcctgcgtgagggcggggcctcgccgctactttccccgccccctcactgcgtgcggtagccaatgagagccgaactggacttgaagcatctacgttatccatgaagtgtcgcgagagaaacggacgccgttctctcccgcggaattcaggtttacggccctgcgggttctcagaggcaagttcagaccgtgttgttttcttttcacggatcctgccctttcttcccgaaaagaagacagccttgggtcgcgattgtggggcttcgaagagtccagcagtggggtaatttaggaatcgcattcgtctcctgtttctgcaggttcccaggcggaagcccagagttaactggaacctcgggaagagcgggccgagtgggcaggggaggggtcctggcgggctcagcgttctgattccgaggttccctgcggtgagggcgtgttgaggcttggaatcccgacggaatctggagctccagatgtggtgggggttgtctcgcggtggcagccactcttccccaaacctggctattttcagtcatcctgctggtgcttaaaggtgttcctccgcagaccacgtgtttgtttatttacactcgctttaaacgcgggcccgttcccttttccaaactagccaggtcctttaaaaaaaatcgtggggtttgaataggaaatacag

SEQ ID NO: 335 - DNA, 1125 bp, Homo sapiens
tcctccgcagaccacgtgtttgtttatttacactcgctttaaacgcgggcccgttcccttttccaaactagccaggtcctttaaaaaaaatcgtggggtttgaataggaaatacaggattgcctctgttctccagagtaacctatgcgtgcaacttaaaaatatctgcacatctagagttgtttgtgtgttgaaccagaaccgtatgtgaccctttctgcccatttatttagcatacattaatttcccataagagcacgggaaaggaaaataggagtttaatcatcttggtgaaactaggaaacaggatgtacactggagatatattattttctatgctcagttcattaaaaaaaagtatagtgggtgcttagatgaaaatgagacttctaaatttgccagtctaattaagacgtctgtaccttgtgcagcgtaaatcatgttggttaaatacgtgcaggcttttaaaaaatgtgttttatgatgtaattttgtttttagaatttctagaatttggaatcgagtgcattttctgacatttgagtacagtacccaggggttcttggagaagaacctggtcccagaggagcttgactgaccataaaaatgagtactgcagatgcactgtaagcacctgacttctggaatcccttgttatttggggtttctaaagctcgtcaactgtgatcacagtaaaagaaaacttatttaataagcagtaaataaggaacctgtttatgaacagaaatattagtcatcaaaaagggtatttggaatgttttaaatatttatctgtttgttaactggaagctaatatgcagctatagattggagtcttgcagtaatttgatatattgatatagtattgtttatgttcttaggcttcatcttaaattattgaagtgataaatattcttgaattttcctgacaaattcttattagtcaatgcagttctgtttaagatttttagagtaaattcctctagtattaaataagctggaaatgaatttgaatggaatgggaataaataaaaggactgtaaaagttatgtgcactttgggaggccgaggctagcgggatcatctgaggtcaggatttggagaccagcctgaccaacatggtgaa

SEQ ID NO: 336 - DNA, 1133 bp, Homo sapiens
actttattaatgaaatctaactctgtagagagtagagtcatgcaagtgtcttcaaggccctgaatgtaaattattgcatattagtataaaattgactcataaacttagaggaaggctttttaaattaacttcgattttcctggaagagtacgaagtcagataaataacaagtttatttatctgaggaaaacaagcaaacttttgggcctgggttacatgagtttgtaaaactggttataacaaggttataaatttttgaagcagttatagaaccttgtaaagatttatgtacatttgttctgtattgaactagtggttaggaaaactgtaatgttaatgataacgttgaatacttcagattttcagatgaactctaaggctaaaaaaaatgattttactctataactgttattatttattttataagtttgtctcaatttgtttgaatatcctttaatgaattattaatatattgaaatgtttcttctttcttaatatagtgatgatgaaaacacatttaaaatattagttgcaacagatattcatcttggatttatggagaaagatgcagtcagaggaaatgatacgtttgtaacactcgatgaaattttaagacttgcccaggaaaatgaagtgagtgtggtttgtatttgtgcactatctaccatattcccttggttaacaagttatttttccttctaaagttagagatttgttttataagctcaggtgcttaccttgcctgcttgaatatcaatatactgaaagctcaaagctgattttgtatgctttgtgtcttaaattcaagtaggagctacttttgtaaatagtctgttaaaatttacaaatgtttttggggtgtttactgaatgcaggatcctgtggcagtgtctattcgaaatgtaaggtgactgtcaaagcttctgctttcagataacgtagaagaaaactggtgtgaaagacaaatatccacaatccacagatgcaaggttgtatgtgataggagccctaagaaaattctaaataacatttcctttgagtttagaggcagaaaaaatcacgtttagattatagcaagatgagtttaatgaagaaggttgtgtttaacttgggctttggaggaagggtagact

SEQ ID NO: 337 - DNA, 1161 bp, Homo sapiens
atattttattcatcattgtatcctcaggactcagtagagggtcttgcatagagtcagtatttaatgagggcagggatataatctattttgtagattgctattttttgagcttctagaacctgtaggaattctgtaaataaatgctgaatgaattaaatgaatgatttggattgaatttggtatctcttcccatacgttctgttaaagtgctaagtttatgtttgattcaaataatagaaaaaatatgatcaccttgtgtggcctgaatcagagacttggtgtaattggaagatggcttttttgaagatagcttagtcagctaaattagaaccagattaattaccagattgaaagtccctttgaataaataaaatgtaaatttttaagttgccatatataatagtgtcttttgtgagtttttttttatctctttcatctgtagtttacaaaaattttacctgtaaaacatactaattttaacacctttttctgttgatcaggtggattttattttgttaggtggtgatctttttcatgaaaataagccctcaaggaaaacattacatacctgcctcgagttattaagaaaatattgtatgggtgatcggcctgtccagtttgaaattctcagtgatcagtcagtcaactttggttttagtaagtaagtatatttatttacttgagtgagtgattacttgtgtatggtatttgctgtataagacacgtaaacacacaactgttttgccttccatataagctattttcttagtaaatatcattctttgaatttttttgtacatcattgtattaatttatattttcctaattaatagtggaactgacccagctactcgggaagctgaggtgggaggattacttgagccccagaagcagaggttgcagtgagccaaaattgtgccattgcactccagcctaggtgatagagcaagactccatctcaaaaaaaaaaaaaaaatacatggtgggactgaatatcttctcaggtttatattgtacattttggtatcctctcctgttcgtatcctctgcctattttaaaaattgagatttttttgtttgtttttctacctgaattgcagaagttacttatatattctaattagtaaacctttgtgatacatatattttttcccaatcaat

SEQ ID NO: 338 - DNA, 1088 bp, Homo sapiens
tttgaaagatgcactagaaattgctaacattatttgcctctgagaagaggagctggatggctgggggcaggggctgacaggagactttaatttgaacaggcaataagtgatagagctgggagttttaatctacctctttgggattctaaagtatatggattttcttccctccccccactacgaataaaaaccatatgctaagtttttaaaattttgaaggcttattaacttttcattaattagatatactactcatacataccacaagcactgtttattatagttggggtttctttaaaatgtagtgctttgagatattttcaaactaattgaaatgaattgtcgcctatgattttattttttaaagctctaaactagtggtcatatgccaatgtagattatgcagtttgcctatgattgcattaatattttggaggagaatcttagggaaaacagcttttgtcccgtatggaaattttaagtaactttttttttttaaggtttccatgggtgaactatcaagatggcaacctcaacatttcaattccagtgtttagtattcatggcaatcatgacgatcccacaggggtaattattgttttcttagagtttgttggaattttggaaatgatcagtttagtttgtctgtggaaagcatgccttccctttttctcattgtgtagtcaaattgagtcaaaagtcaagttgacttttcacattcatacaagcttttatactgctttttagattttttaaaaatctgaaataagaattggtgtatgagctatgcttttatttcattaatactgatgttaacaataagaagccaggagtaggagtgaacacctaacatctgtatagtggtttacagtttgtcagtgtttttataactatcttataaaatctcacttttaggaaatgattgttcaagaccatctttaaatctaaattagattatcttattacctgtttgatatggaagtaagactagagatcctacaagtattttttcattttatctggtcattaatattatgaatcactgattatctatggtcttttttccccaggctttaagacggttgctt

SEQ ID NO: 339 - DNA, 1142 bp, Homo sapiens
tataactatcttataaaatctcacttttaggaaatgattgttcaagaccatctttaaatctaaattagattatcttattacctgtttgatatggaagtaagactagagatcctacaagtattttttcattttatctggtcattaatattatgaatcactgattatctatggtcttttttccccaggctttaagacggttgcttaatattacaaagcatttatctcatggctaatttttatttttttgtggccaagacatcataagttttgatgagatattaaccttgcctttggcatgtgattccagttgctgtaggtgatttgtagtacaaaaatgtagcaaatacttttactattgtaattttgttttgagaagacactatcctcatctatgtttttgtaagtagaatatggagtatgcttttaacaggtgatacgatattcatgcagatacctacttttacatacacactaacattctttgaaattattttgcataggcagatgcactttgtgccttggacattttaagttgtgctggatttgtaaatcactttggacgttcaatgtctgtggagaagatagacattagtccggttttgcttcaaaaaggaagcacaaagattgcgctatatggtttaggtaagacagttttattttactgtttatgtccatgtgtgattctttaaacaattgagaaatttggagataagtttgtatctgtttggaaaaaatggggcaaaccttattctttattggtgactataaaaaatgatggatggttttggtaaaaatttttggtgaaaaaatgtcttttcgttactatttattattttgggttttttttagactcaggtgtagaatcctgaatgttagaattatagaataattagcaaaactgcactttgatatcttggaagtctttgaaaggtctaatgcttcactgtacaataccgctagcttataattttgtgcagctttcataatacctctggcaagtagaaaagcatcatggttatttatattttagagataaggaaaatgaaatctggatgttatatctgattctgcaagtgaaagagcaggaagtgaaatatacttttcttaaaaaagctattaacagttgttttaatcactgcagt

SEQ ID NO: 340 - DNA, 1115 bp, Homo sapiens
tactaaaagtgcaaaaattagccagacgtggtggtgcatgctgtaatcccagcaactcaggaggctgaggcacaagaatcccttgaacccaggaggtgaaggttgcagtgagctgagatcacaccactgcactccagcctgggcaatggagcaagactgtgtttagaaaagaaaagaaaagaaaaaaaaccctgaaacagctaggcatggtggcttatgcttgtaatcccagcactttgggaggctgaggcgagaggattgcttgagcccaggagtttgagaccagcctggacaacatagcaagaccctgtctcagttaaaaaaaaaagataaaaaaagaacctgcaacatacccacttataaattattccagaattcaaatatatctcccaacagtaaagtgaaatactttgagaaggacataatttagaagcaaaatagattcattttttaagccgaagtaagaaaacaatttaaaaataatgtaatgtccatttcaggatccattccagatgaaaggctctatcgaatgtttgtcaataaaaaagtaacaatgttgagaccaaaggaagatgagaactcttggtttaacttatttgtgattcatcagaacaggtaaaacttttctctgaaaaagtttgagccaagtgctgaggcttcccaaatctgtttctgagcttacctattttagtgaaatgcccttaatctttcaaggttgtcaatgcaagatcagacaaaacatagatttgctttgtgtgatttcattttgaaattgtttttagtatatattaatacctacaagaatatttgtaacataaggataaggcatacacatgaatactcctcaattcaacaaaaaggtagaatctttttgttggattatccattcctttatcccattccttttccctgatcccacctgcttccccctatcccaaagggaagcattattaattttgaattaattatttcattgcttttctttgctgtttaatcacatgtatactcatattatgctatatttacagccaacttatgttcagcattacattactgagatccattttgatgcttggatgtgtaatttatttttactgatgtgtacagttatgctt

SEQ ID NO: 341 - DNA, 1186 bp, Homo sapiens
tttatttaatatttgatattgaaaactcttagcacttatgtgagattgatgtttttactcccattatatttattagtaaaaagataatgttaagaaattactggacatatttatacttacttgcattttctgtgtgttttctctagtatatagttagactgatttatagatttctactattgatagaattcatgcttttctgattgaccaaaggggaaatccttcctatgtaaaacctttcatgatcttcctccaaatatagaattgactgctttctcttttcgggtttccacttgtctgtgtccaataagtttgtaaagctctcaaggtcaggagttagcattgatgatctttacattcccaatcctgtgcacactttctggtacatagaaggatgcaataaaatctttagtgaatggagaaagaaagatctgtatagacttcaataatatgaaatttttctaatcaccgaatttatatttttcaaaatcttgatacaggagtaaacatggaagtactaacttcattccagaacaatttttggatgacttcattgatcttgttatctggggccatgaacatgagtgtaaaatagctccaaccaaaaatgaacaacagctgttttatatctcacaacctggaagctcagtggttacttctctttccccaggagaagctgtaaagaagtgagtgttatatattttgagccaatttttaagaaatctttgctataataactaatcatctcataggtttaaggcctatgttaaggttaccgctaactggcagtattgtcatttatatgatagctttatttttgaaaattgatcattctgtgtagtcttattgtttttccagattttaagccattttcaaaaagagagcatccaattggtgttattttgctgctcattaggcaaattcaagatgcacatttttattatatttcaaggtagatgttttaggttgatgattactaatttcacaaagttcattataaaaaattatcctaaaaccatttaattgaaaattttctgattataagtgcagtataatagatctcatttttaaaacatttttgggggaatgatatgattgtaagaagtagttaacagtgattaaactcaatttttattatgggttttatcttttgaatcacttgagttctgattgttacaatgataat

SEQ ID NO: 342 - DNA, 1172 bp, Homo sapiens
attaaactcaatttttattatgggttttatcttttgaatcacttgagttctgattgttacaatgataatagggttaaagaatatggtagtagaatctatgttggttggttttttttcttcatgagtccactgcaaaatcattttgtctatatgtgtacatgtatgtacatatacataggtatatagatgtaatactatagtctacatatgctaccatcatagtcctgttaacatttttttatgcttattatgtctatcttacaagactgatcagacagggataataatggatgagttgattttactctggggaaggaaaatgtctaccatcttttcctgtgatgataacattaaggttaaattagcagaaacatttatttttaagagtatgattttataaagaagcatttttagaaactaagaaatatgaaagctttcgtttgcacatcaccctgaggaaatttacactgtgactcggtgttcatttctctccacttcagacatgttggtttgctgcgtattaaagggaggaagatgaatatgcataaaattcctcttcacacagtgcggcagtttttcatggaggatattgttctagctaatcatccagacatttttaacccagataatcctaaagtaacccaagccatacaaagcttctgtttggagaaggtaattctttttgataaagtcaatgagatctactttagttgaagaattattcaccttcaattaagtaatttaatagagtagagggaagcctttatgttgattacattctcatgaagcctgtaaggacactgttcttcagtgaatgtgtttaattgtgtccaagatttttttttttaagtcattgagagagaggaatactggatgttaaaaaaaattaaatctctctcctagtttctttcttccttttcaaaaacataatacataatcttttctcctttttaatcctgatttgatgatttgttcattttatttatgaaagcaggcagtaactttgattgaggaatgggagactatcgtgtgtgagaaaagccttagcttctaataatctgtattaggcgtccctttcaccctgaaagctaccccaaatgaaatgtgaaaaatgtgtttgctatccaccctattgctgcaatgtaagtcccaaacctccctctctatgcaca

SEQ ID NO: 343 - DNA, 1081 bp, Homo sapiens
gaactctttcaagtctaagatgttataatcttatcctctcagagtatgagacaactccacatatttgaaaacatcagtcttattttcttttaccttgaactcttccaagataaataatctaaagtccttgcttattgatccctaaatcttctggtgagtctcccatggatcatatgactgcaaaaactagacttacttggttttaagttggtaagctgaggaaagccttattgaaacatgagtagtaatattttaagttttattctaaaagaattattttagagattgaaaaattatgaagaactttcatgaaaggaaaacattaaggaatagtattaaaggagcattacaagaaggtatatttgaaaaggtgtcataaatgacctaggaaataaagatgattatgtagttcaggaaaattcctgtggtaataagctgctattcagccaagttaaactcagtttactacgttgttttttaatctttttaaaaattttgagattgaagaaatgcttgaaaatgctgaacgggaacgtctgggtaattctcaccagccagagaagcctcttgtacgactgcgagtaagtcctatttatatagattgaatattattaattttcaaagcatagtaatgtacagtttacatggtttctttgaaaagtagtgaggagagtgctcatagtaataagaagagcaatcaccatcggaggcaaaaacaaagatataaggatttgagttaatcacagtttaagtgataggtttggtaacttatttttctcattttctaaataatttgttgttatatttaatagattggctgagctctctggcttcatctttaactacctcctctactcacttcattccaggcatcttggccttctcgcagtttcttgggcatgtgggatgtgctcttatctccctttagtctgctcccgtgtcacctcactgcagccctatcatcaagattgcagcccctaccttctctccagtgccctgatttcacttaccttcttctgcttcctcttttcttcttatttttttccccgtaacacatccttctaatctatgtacggtttat

SEQ ID NO: 344 - DNA, 1127 bp, Homo sapiens
tggaggtaatcatttctcaaggctcacagatttgattctttattacctggatgttcctagcattcatctttctcttgaggcacatctctaagatgatagaccaatttactaatgcatttaaggctagtattttattttggtgtgtgtttgtttgtttgtttgttttgaaagttcagaaaattgttttcagatggtttgcttggtaggtacctagactattagtgttatcagggggagatgtaatcattctgcattgtggaaattattgcaataccttgattccatcgaacaaagtattttgcttatgcttataaacttttcaaacattagtttctcagtaggataaatgatatagctccatcatgatctactgtagaaaattaattcataaatttcaaagtatcaagcataaacactgtgaatactgaaggattagtgtgtgttttaaaaattggcaaattgttgtttcctagcgttcatagattattctgtgttttcaggtggactatagtggaggttttgaacctttcagtgttcttcgctttagccagaaatttgtggatcgggtagctaatccaaaagacattatccattttttcaggcatagagaacaaaaggaaaaaacaggtaagctagttatttttatgaggtaaaaaaatgttcttataggatttgtgaaggaatctttattaaaaactgtaacataataatggaagatgttttaatatgattgtaatgtcttaaacaaattgacagtgggaataattctcttgtcttctaaaaattagatagcaatcttttttattattattataccttaagttctagggtacatgtgcacaacgtgcaggtttgttgcatatgtatacatgtgccatgttggtgtgctgcacccattaactcgtcatttacattaggtattgctcttaatgctatccctcccccctcccccaaccccatgacaggccccggtgtgtgatgttccctgccctgtgtccaagtgttctcattgttcaattcccacctatgagtgagaatatgcggggttcggttttctgtccttgcggtagtttgctcagaatgatggtttccaccttcatccatgtccctacaaaggacatgaactc

SEQ ID NO: 345 - DNA, 1101 bp, Homo sapiens
tccagtttttgtccattcagtatgatattggttgtgggtttgtcataaatagctcttattattttgagatatgttccatcaataccgaactaccttgacgtcacaaggcaccagcagtacccatgattgcttttgcatcgtcagtgtagcaatgatggcagatggcaaaatggcaaataacatcttaggattattatgaaagtatttttgacgttattactccctgaatgggtcttgaggacctccagaagtctgtgcttcacccagtgagaacagctacaagacacctatcctggaggtatgaacgagaaatactgactgtggggaaaagaccgtggctattaacaaaaatggcttgttttgcctcaaaatttaccatgttgagcaagctggcagttgctaaagtttggccttaccttctccactgacaacttgcaatgagtatgcacattttaacattatgatagaagctattttttgatatacttctttttttctaggagaagagatcaactttgggaaacttatcacaaagccttcagaaggaacaactttaagggtagaagatcttgtaaaacagtactttcaaaccgcagagaaggtaatttcttacagttcacattttgaataatggctaccttatagtaacagattttaatttaggatatgtttagttgatagtttaaacaaaatgaatcctcaaaatgtttctatgaagtaagtagggtgacaattaattacattcatttgcagttgctgcacagcagggaaaattagtgtttaattaatgttagttattagtactgttattaatatagctgttattgttgatgttgttattctctttctttgtatctctgttgcaattattaaactgaataattttaacttaaatcagggacattcttaagtgaaacttagaagtaactagggtgacatttacattcatttgtagttgctgcacatcaaagaaaattagtgtttaattaatgttaattgtgaataccattattaacataactgttattgttgttgttattttcttactttatttgtatctctgttacaaagatctcaatccagatttagttttctcacatt

SEQ ID NO: 346 - DNA, 1174 bp, Homo sapiens
tatctctctaaccatttccccagagttatttttccttccagctcccatctgcctccctcttgtgcttttcaggacccttatgattacactgggcccacctggatagtctctgatactctccctattttacagacagctgattagcaacctttgttcctctttgccatgtattcacaggtcccagagtttaagacgtggacatctttagggggctcttattttgcctatgacactggttaatttcatctctattaatcatagctgccatttttggactccatatcctagccatcaggcctctacatttcacgtgtcctgtactcctcccccatttctggttttgactttgctttttctggttcctgatattagtaggcttaactacagctgttcactatattttttctctggtaacatatttggtaattttccttgctcatctataattattttgtaaggaataaaaactatttctgcatccagtgatttgtatcttacagaatgtgcagctctcactgctaacagaaagagggatgggtgaagcagtacaagaatttgtggacaaggaggagaaagatgccattgaggaattagtgaaataccagttggaaaaaacacagcgatttcttaaagaacgtcatattgatgccctcgaagacaaaatcgatgaggaggtaagtaactaatttgagtgtctaggtctatttaaatagtctgtctttaagagtagctctgagatttttttctggtaaatcactatttaacctctctgatttgtttagtttttctcatctataaaattgaaatgataaaatgaaggttaaattagaaaatgtagaaaatgcctagaacagagtcttgcatatggttggtactaaagtgttttgttccccatggatagtatcttctcttaaagatcctttgaaagggctttaaagtgaaccttgtaggatggtaatttttgttcattttaatttttttagtaagttttgattgagatcttgaatttcatttagaaaatttctgctaagcaagaagcagtggaaaaattacaggaaaagctgtctagacttgactacatagaaattataaatgtttgcatatcacattgtcaaaaaacaaaattaaaagatattgacatgaaaatatttgtatgtgggcagaaaaaagttta

SEQ ID NO: 347 - DNA, 1063 bp, Homo sapiens
ttgataccaggaccatgctcagcaaaccttcatgagttgactcttaataaaaatggatcttcaggggccacccacttcagatcccatttcacagagcctcctggatgtcttgcagcaaggtgcacaagagtgatttgcaatgtaataaatatttcaagccttgtcaaggagatatttttgtttttaactagtttactgaagtgtaatacccatagggtattagaatttttcctgtacagtctgaaagactttttcagtgatgtgaaacattttggcagcaggtaatataattttgcttcgggtcaatatgagtttttttttttaagagtacattgtgcaattttaacgttaataattggaaaaatatgatttacttttgtgagacattgttaaatttgcaagttttataacataaagcatttcttaattgtagccccttgttttatatttacataactggaataggcaacatgtttgtgatttactctgttatgatctaggtacgtcgtttcagagaaaccagacaaaaaaatactaatgaagaagatgatgaagtccgtgaggtaattattctgctgcaaattcttgtgtttatatatcactttcttaaactagaataaccagtaggtttagttagaatagtcagtccataggtctaggggataggagtgagctggggttggcttaggatggctgcttttggttgatttcagttcagcctacaaatattctgctcattgctctttttttccattttgttcttgtctaaaacctgtttagcaagtgcagtgactcacacctgtagtcttggctacttgagaggctaaggttggaggggattgcgtgagcccaggagttcaaggctgcagtgaactatggctgcaccaccacactctagcctgggcaacagagtgagaccctgtctctaaaataaataaataaaaataaataaaacccatttaattgtatgtgtgtggggatatatacaacaaaagcccctattactcaaaataatatctctttgttagcagagcatcttatagataaaatcttatcttactga

SEQ ID NO: 348 - DNA, 1220 bp, Homo sapiens
agtatggtagattggtctgacagataataagtattaaatttgattggtggggaggttctcctttacacatatataaatattttttgtttttatttttatttttgagacagggtctctctttgtcacccaggctggagtgcagtggtgtgatcatagctcactgcagcctgtatctcctaggctcaagtgatcctcctgcctcagcctcctgtgtagctcgggactacaggtgcatgccaccatgcctaattttttttttttttttttttttttgtagagacggggtttcgctgtgttgcccaggcttgtctcaaactcttgggtgcaagtgatcctcccgcctcggcctcccaaagtgctgagattacaggcgtgagccactgtgtcagcctcctttatgtttttatagtatgattagttcatgtcaatgcctaaattaatgatttttaggatggtacgttatctcattgtgtgtactttctccttcttctccctcttaggctatgaccagggccagagcactcagatctcagtcagaggagtctgcttctgcctttagtgctgatgaccttatgagtatagatttagcagaacagatggctaatgactctgatgatagcatctcagcagcaaccaacaaaggaagaggccgaggaagaggtcgaagaggtggaagagggcagaattcagcatcgagaggagggtctcaaagaggaagaggtgagcactgagttcagtcctgtgcacattcacacttggcagttgagtggaaaatacagaattagatcttgtcagagttgaattataagttttatttctaaaacacggttctttaaaaatctatttttataatatataaagacagtctttaaggcagttctgacatgtgccttttacttaaataaattttgaatggccacatgcacttagggttttaattgttcttagcacataccttataaaagcttcactgtgtttgtcacgtagtaccttttggatacatttaatgtcatatgtattttcacatgtgcaaagtaataggcaaatatgagttgttaaagaaaatagctaaaagcctttggcaacaggaggaaaactccagatcatacaattattatttttgttactgtcataagatacaaatacacatatgcttatcaagtagtctttataaagtcagtttaagaaagaaaactgccccccaatttgattcctaaaac

SEQ ID NO: 349 - DNA, 1084 bp, Homo sapiens
gctctgttgcccaggctggagtgcaatggtgcgatttcagctcactgcaacttccgcctcccaggttcaagcaattctcctgcctcagcctcccaggtagctgggattacaggggcccatcatcatgccagttaatttttgtatttttagtagaggtggggtttcaccatgttggccaggctagtcttgaactcttgacctcaagtgatcctcccgcctctgtctcccaaagtgctgggattacaggcgtgagctaccacgtccagcctatttccttacattttaattggataaattaaattggataaactgaagtgtggcctaaaagaatagtctctgaaaattggtcagactctagatgtttgttcttatatatatgtctggctttttacagacaaactatttgacataagtttatttagctttcattttttagtgttgtatgaaataaaccttagctgctgataggcttgtacattgactgttcatttttctaacagcagacactggtctggagacttctacccgtagcaggaactcaaagactgctgtgtcagcatctagaaatatgtctattatagatggtgagtatagactgcaagtgattatttataaattccaacattagaaagaccaaggtaatcaccattggtagcccttatttgtgttgcaatcattgggaagttataagggcaattaggatcacaggataaattattttttaaaagatctttgctatgcattagagttactgaagagggtaagcttttaaaatcatgttttataggccaggcacagtggatcacacctgtaatcccagcactttgggaggccgagacaggcagatcacgaggtcaggagatcgagaccagcctggccaacatggtgaaacccggtctctactaaaaatacaaaaatcagccaggcgtggtggcacatgcctgtagtcccagctacttgggaggctgaggcaggagaatcacttgaacccaggaactggaggttgcagtgagccaagatcatgccattggactctaccctagcaacagagagagactccgtctcaaaaacaaaacaaaacaaa

SEQ ID NO: 350 - DNA, 1059 bp, Homo sapiens
aatttttatcatagaatgctgttttctagaattctcctctggaatatttcttagatattgaatatggctactaaggtagaggaaaatgagaaactactggaaccccatggctcctaatgtagcaacagggataaaggtatcgtcaacaacaaagaagggattaggaggctttccttcaatacatttgtagttcatttggttaggtgattagattttatccttcaggtgtttttctatgaaatatttttagtgtgtgtatttataaacactacagtatctcaataagctgggaaataatgagactgacagttgggcattgagttatgcgtacctataattctatctccctttagatttttaaaaatatcaaatagttttataattaggcatcattcagttttgcagataggactcagaaaatctttagctaaagaagtatgcaagtttttctaagttattttaagaataacataatgcacatttcatctttttcattctagcctttaaatctacaagacagcagccttcccgaaatgtcactactaagaattattcagaggtaagaaaaaaagttttatggttgtgtattaataatttatgttttctgcattatgaattgtcaactctctgatttacaaagtaaataaaagaagaaaaattatggaacattaaagctggaaggagctttaccaattatctctagggcttctaggatttgattttttttttcttggttgctctctttttttaaataatggttattatagaaatccataaatgttatgtatacagtaatgttttcaaggataacagtgttgaaccaaaagagctcatacatggaatactaatattgaaggtgagttcaatggttatagaggttttttctatgctggatttccttttgttacttatcttcccaaaatactagctgtgccttaacagctgttgctagacttaagatgaatgaaaaggctggagtccagcgatccatgtggtttgccctaggtttagcctgggccttctgctcttcctttcgattccaagaagagtccaatatgg

SEQ ID NO: 351 - DNA, 1068 bp, Homo sapiens
aaaatgtagagaaatagtattttgggtggtagaatcaacagtcagaaatatctttattgggtcttaacactaacaaatggtatttaagagggacagatttaacagaaagatatctagtatttcccacatggtctgatacctcatttaaagttggagatggaacactgatggtctcacctctcataagaaactaagaggaaagtcataaggtctgcatatgagcctatgcaagtcattcaccagtgtaactgtgttcccttaggtgctcaggctcctgggatggccaggagagaggtgagcaaaaagtaacatttgtgaatgaagagggacattggagggaggtcagactgagtgttagttttaatggttatggctttctgtctccttttttgtggctcatatataacttaagatttaatcgtgtaattcatttcttcattttcatttttattcagagtctattctcacaaaaactgtttgttgctttgtttccttgccaggtgattgaggtagatgaatcagatgtggaagaagacatttttcctaccacttcaaagacagatcaaaggtaggtgcagtgattttctgcaaaagaaacatctgaaaaaaattaaaaattatccagaattccaaagttacacatttttctatgccatgtaagtttaacagacttattttcaactagtaaagtatgtagaggaatgaaaacagaccaagggctagtttatagagttgatgcagcattagtacaaggattttcagtgaaaattgaaatagcctgtaatttttttccttttgactttattagtgcttttctttctttttatttatttatttattttttgagacagtgcctcattctgtcgcctagactggagtgcagtagtgcgatcttggctcactgcaacctccactttctgggctcaagcaattctcccacctcagcctcctgaatagttgggattacagacgtgcaccaccacacgtggctaattttttgtatttttggtagacacagggttttgccatgttgcccaagctggtcttgaactcctgagctcaggcgat

SEQ ID NO: 352 - DNA, 1076 bp, Homo sapiens
agagtaaaaagagtaggaattatgattttcttattaactgagatttgaatagaaaatatttcaatgttcccatggttttcagaagtggaagatggtaatgtatacattttggtacatgataagtactataataatataagtaagtattgttgtagtacttaatatgtgtcaggcactgttctaagtgtttaagcatattaacacatttagtctttataaaaccattatccccgttttacagatgaggaaattgaagcacagagaggttaagtaacttgctcaaagccacataggtagtaaagggcaaaaccagagttcaaacctcggccccagagtccttttccttacagttaagttttattgccgctaatgtagattttaagggaattgtgtgttatttatattcgtggcagctgctggattgaaaaacttagccagaaaggcacacttgatgaattatgtagttcattgtgtttgtttttgtttttgttttgcctcaggtggtccagcacatcatccagcaaaatcatgtcccagagtcaagtatcgaaaggggttgattttgaatcaagtgaggtaaataagtaatattgttaaattttaattaatttttaactttataaaatttaaatagagactgccagctagttgctgaacttttttttctttgataaataacttcatcttttatgttcagggagtacatgtgcaggtttgttacatgggaattgcgtgatgctgaggtttggtacagatcccatcacccaggtagtgagcagtaggcagttttccaacacacatcctactctcagcctccactctctagtagtccacagtgtctgttgttcccatcttcatgtccatgtgaactcagtgtttagctcccacttgtaagtgaggacatgtggtatttggttttctgttcctgttaatttgcttaggatagtggcctccagctgcaaaggacataattttgttctttttatggctgcatagtgttccatgttacatatgtaccaccattttctttatccaatccgtattgatgggcacttaagttgattccatgtctttgc

SEQ ID NO: 353 - DNA, 3879 bp, Homo sapiens
ttgctaggttgttttttgcataagtgtgagagtagctagctatttctagtattaaatggtaatgggaaataaaattacagctgtttctgagttggatctccatgtggcttcattattttttcgctgtgaatttccagaagagtagatacaactgtaataaaatgtaaatgagaaaatatattcaaaaaccaaatataaaatgacttgaattatttttctggcttacctatacttcatttatctttattaaggttagtaagggaaatgtgtgtggtttatattgtagatacatgcacacacagcaggataaattttcattttaatgctcattaagaatttaattgtacttaatatattttgcagttataaaggaaatagaaaaataaagtctatcccatgtgaaatgactctcactggtattgttttgcccataagaacttctgtcttgtttcagtgaagcagggaacaatcactaatacaacatttgtatctcatttcaggatgatgatgatgatccttttatgaacactagttctttaagaagaaatagaagataatatatttaatggcactgagaaacatgcaagatacaggaaaaatgaaaatgttacaagctaagagtttacagtttaagattttaagtattgtttcctgagcataactccataagtaagaaatttctagttcacagacatacaatagcattgattcaccttgtttttttaacctggttgttgtagtaagagctttgtttcaatatcactcttgagtaaagattaaaataaagctaccattttacatttctatttcataatgaaaaactatgtcagtattttaatatggttacatttagccaaagttgagggaaagagcttataaaatttaacttcttcataattttagtaatttcctagaggttctgggttttctgaaagtaaaacaatttatgcgaacctatgtctaaattcactgtttgttactatgtatgtttttttccaatgcttcttataagactaaatgattagaagtacctaatagtttgaacagatatgtttttatttaaaagagtagaataacctttcagaattactgagttttttattccagttgtagcaaagatttcaaaagattgtgttcccattaagtggtagtaatttcctttattattctgtatccttaatggtgttctctctctctctctctctctctctctctccctctcccccccgttccccactcttcctttctcctttgctttttcttctctttcatacatatatgcgtgcctagttctaggaggaaacgggttaaaaattgttttaaactacatcttgaaaatattgaagaatttgttttaggtagagtggtcagttgaaccttacagtaaagtatagaaatatatttaatgtggaatgtcaatgccaggatttctcattaacaatattttatctcaactttggttcctgtgatacatttctgaatgggcaattccagaaatcttagtagcccatgttaagcttctattttttacttgttttcggggagaaataagaattagacatcttcagatttaagttaaataatcccattctttataatcctctgtaaaaagatccctgagattattccttcttctagttttatgcgacagctttactttaaaattcaagttatacatcttgggagtacaatggcccgacatttcttcataggtagaaacaaatacttgactcagtgatactcatgaccattagaatagtcatacctggaatgtgtcaaattataagagacagacacttggttagtggctgcctcatatagcacttttgaagaggcctaagtcaaaacttgcaatataacattctattgactttcttaaaaatattttttctgtacctaacttgagcataagggttatttgagcaagtaacattaactcagtggaaggcattgtcctgtgaaatattcttaggcagatctgcccacatctttattgaacttgaaatctaatatttctagtatttgaacaaagcagaaggttaagtcagggaagagcagtgctgtccatgatgtaatggaagctaccaggggaggcagtgtctggatgatgctgtgctacctacccctgcacaagccatgctggctcagtctgagctgtgggccacatcagctagtggctcttctcatgcatcagttaggtgggtctgggtgagagttatagtgagggaatggtcactaaagtatcctgacaagttcctaggaaaaaaggaataaagtttttttccttaaaaaaaaaaaaattgctcttggctgtgaaaagaggtactaaatgcgattcagttcaccgctaaggaaagtgatgacatagcagttacagagggtgataaatctctccagctaattcaggtcattttgtgaatactatgtatcaagccctgaaaatatggtaaataaaacgtgacagggaaacctttttttgattgaatattgttacatagttaaatgtgctatatatccttaatattttatattgatcctgcaaaatctgttggttttaggggagttttgttttttgtttctaacaattttcagacctgttggtataggaatgtagaagtctttcagatgatttgaaagcagctgcatttgctcttggaggctttgggagagcaggaatgaaaacattcagaggaagacatctgtagggaattcttctgttacttaccaaagaataagtgtctttctggtgttttatttcctatcataaaaatacaacagtgcatttacaaggttaaagattcctcgaagttctaggaaattcttgaaaatataagtggtgcttagaaaattcaagcatttaggaatgtgacctttaattcaggtatgtaaaagacttttttcccaaacttttaaaagtaggaaatacaataaatacagaaaagtcatatggttgaataaataattataaattgagcactgatggaatccctctacaggtcaagaaatagcgcagtgtcctggatgcccattatattgttttctcctttctgggtaacaagccctaacttctgtaatttaaaagctcctacttttgccacaaggtggtgcttctgccattagacgcagttaggaggatgcaactgcaaatctaaaattacgaagttagtgtagttgcaataaacttagaacatatgcattaatactaaacctatgcagtaataccataattagccttctaatcatgtaatttgctttacttaggtatttcatttggttcagcctgttatggaatttaccagcttgataaatttgcctataaagttttataaagaaaaggaatattttgttttcataaagaggaaaatccattcttagaaaaaaactgagtaaaaaagtatctcaatgggctgggtgcagtggctcatgcctttaatcccagcactttgggaggccgaggagggggttcacctgaggtcaggagtttgagaccagcctggccaacatggtgaaacctcgtctctactaaaaatacaaaagattagctgggcatggtggtgtgtgcctgtaatcttagctactcaggaggctgaggcaggagaatcgcttgaacccaggaggcagaggttgcagtgagccgagattgtgccattgcactgcagcctgggcaacaagagtgaaactcaatctcaaaaaaaaaaaaagtatctaaatgtaaaatatcttttttggaaatatagaatttaaaagcgactttcccccaaagaaatctgatgtcctttttgtatctgtcataaatttaattcatagtattttgggttttttttgttttttttttttgagacggagtctcgcactcttgcccaggctggagggcagggg

SEQ ID NO: 354 - DNA, 1500 bp, Homo sapiens
aggtatgtaaaagacttttttcccaaacttttaaaagtaggaaatacaataaatacagaaaagtcatatggttgaataaataattataaattgagcactgatggaatccctctacaggtcaagaaatagcgcagtgtcctggatgcccattatattgttttctcctttctgggtaacaagccctaacttctgtaatttaaaagctcctacttttgccacaaggtggtgcttctgccattagacgcagttaggaggatgcaactgcaaatctaaaattacgaagttagtgtagttgcaataaacttagaacatatgcattaatactaaacctatgcagtaataccataattagccttctaatcatgtaatttgctttacttaggtatttcatttggttcagcctgttatggaatttaccagcttgataaatttgcctataaagttttataaagaaaaggaatattttgttttcataaagaggaaaatccattcttagaaaaaaactgagtaaaaaagtatctcaatgggctgggtgcagtggctcatgcctttaatcccagcactttgggaggccgaggagggggttcacctgaggtcaggagtttgagaccagcctggccaacatggtgaaacctcgtctctactaaaaatacaaaagattagctgggcatggtggtgtgtgcctgtaatcttagctactcaggaggctgaggcaggagaatcgcttgaacccaggaggcagaggttgcagtgagccgagattgtgccattgcactgcagcctgggcaacaagagtgaaactcaatctcaaaaaaaaaaaaagtatctaaatgtaaaatatcttttttggaaatatagaatttaaaagcgactttcccccaaagaaatctgatgtcctttttgtatctgtcataaatttaattcatagtattttgggttttttttgttttttttttttgagacggagtctcgcactcttgcccaggctggagggcaggggcaccatttcggctcactgcaagctccacgccattctcctgcctcagcctcccaagtagctgggactacaggcgcccaccaccacgcctggctaatttttttttttttttttttgtatttttagtagagacagggtttttctgtgttagccaggatggtctcgatctcctgaccttgtgatccacccacctcagcctcccaaagtgctgggattacaggcctgagccaccacgcccagcctattttgtgtttttttaaagctaactaccattaagatcattatagaagtttggtataatgaagatttgggtttttcagtccaatgagtttccatattcttgaatgaaaaagatccacatttcatcatttgcctgtttcattttcttttagtacttttgaacttagtttggtcagaaaatactagaattttagtttgatctaaagaaccagcttatataacttgctgttgccatgtacatttgtatgtctttgctgtgtcaa

SEQ ID NO: 355 - DNA, 3145 bp, Homo sapiens
ggcgggaaacagcttagtgggtgtggggtcgcgcattttcttcaaccaggaggtgaggaggtttcgacatggcggtgcagccgaaggagacgctgcagttggagagcgcggccgaggtcggcttcgtgcgcttctttcagggcatgccggagaagccgaccaccacagtgcgccttttcgaccggggcgacttctatacggcgcacggcgaggacgcgctgctggccgcccgggaggtgttcaagacccagggggtgatcaagtacatggggccggcaggagcaaagaatctgcagagtgttgtgcttagtaaaatgaattttgaatcttttgtaaaagatcttcttctggttcgtcagtatagagttgaagtttataagaatagagctggaaataaggcatccaaggagaatgattggtatttggcatataaggcttctcctggcaatctctctcagtttgaagacattctctttggtaacaatgatatgtcagcttccattggtgttgtgggtgttaaaatgtccgcagttgatggccagagacaggttggagttgggtatgtggattccatacagaggaaactaggactgtgtgaattccctgataatgatcagttctccaatcttgaggctctcctcatccagattggaccaaaggaatgtgttttacccggaggagagactgctggagacatggggaaactgagacagataattcaaagaggaggaattctgatcacagaaagaaaaaaagctgacttttccacaaaagacatttatcaggacctcaaccggttgttgaaaggcaaaaagggagagcagatgaatagtgctgtattgccagaaatggagaatcaggttgcagtttcatcactgtctgcggtaatcaagtttttagaactcttatcagatgattccaactttggacagtttgaactgactacttttgacttcagccagtatatgaaattggatattgcagcagtcagagcccttaacctttttcagggttctgttgaagataccactggctctcagtctctggctgccttgctgaataagtgtaaaacccctcaaggacaaagacttgttaaccagtggattaagcagcctctcatggataagaacagaatagaggagagattgaatttagtggaagcttttgtagaagatgcagaattgaggcagactttacaagaagatttacttcgtcgattcccagatcttaaccgacttgccaagaagtttcaaagacaagcagcaaacttacaagattgttaccgactctatcagggtataaatcaactacctaatgttatacaggctctggaaaaacatgaaggaaaacaccagaaattattgttggcagtttttgtgactcctcttactgatcttcgttctgacttctccaagtttcaggaaatgatagaaacaactttagatatggatcaggtggaaaaccatgaattccttgtaaaaccttcatttgatcctaatctcagtgaattaagagaaataatgaatgacttggaaaagaagatgcagtcaacattaataagtgcagccagagatcttggcttggaccctggcaaacagattaaactggattccagtgcacagtttggatattactttcgtgtaacctgtaaggaagaaaaagtccttcgtaacaataaaaactttagtactgtagatatccagaagaatggtgttaaatttaccaacagcaaattgacttctttaaatgaagagtataccaaaaataaaacagaatatgaagaagcccaggatgccattgttaaagaaattgtcaatatttcttcaggctatgtagaaccaatgcagacactcaatgatgtgttagctcagctagatgctgttgtcagctttgctcacgtgtcaaatggagcacctgttccatatgtacgaccagccattttggagaaaggacaaggaagaattatattaaaagcatccaggcatgcttgtgttgaagttcaagatgaaattgcatttattcctaatgacgtatactttgaaaaagataaacagatgttccacatcattactggccccaatatgggaggtaaatcaacatatattcgacaaactggggtgatagtactcatggcccaaattgggtgttttgtgccatgtgagtcagcagaagtgtccattgtggactgcatcttagcccgagtaggggctggtgacagtcaattgaaaggagtctccacgttcatggctgaaatgttggaaactgcttctatcctcaggtctgcaaccaaagattcattaataatcatagatgaattgggaagaggaacttctacctacgatggatttgggttagcatgggctatatcagaatacattgcaacaaagattggtgctttttgcatgtttgcaacccattttcatgaacttactgccttggccaatcagataccaactgttaataatctacatgtcacagcactcaccactgaagagaccttaactatgctttatcaggtgaagaaaggtgtctgtgatcaaagttttgggattcatgttgcagagcttgctaatttccctaagcatgtaatagagtgtgctaaacagaaagccctggaacttgaggagtttcagtatattggagaatcgcaaggatatgatatcatggaaccagcagcaaagaagtgctatctggaaagagagcaaggtgaaaaaattattcaggagttcctgtccaaggtgaaacaaatgccctttactgaaatgtcagaagaaaacatcacaataaagttaaaacagctaaaagctgaagtaatagcaaagaataatagctttgtaaatgaaatcatttcacgaataaaagttactacgtgaaaaatcccagtaatggaatgaaggtaatattgataagctattgtctgtaatagttttatattgttttatattaaccctttttccatagtgttaactgtcagtgcccatgggctatcaacttaataagatatttagtaatattttactttgaggacattttcaaagatttttattttgaaaaatgagagctgtaactgaggactgtttgcaattgacataggcaataataagtgatgtgctgaattttataaataaaatcatgtagtttgtgg

SEQ ID NO: 356 - DNA, 1500 bp, Homo sapiens
gtcaaacgtttgtctttttatttattttattttgtattttttgagacagggttttcaatctgtcgcccacgctggagtgcagtggcacaatttacggctcaccgcagcctcgacctcccgggctcaggtgatcctttcgcctcagccctgctaatatctgggatcacagacgtgggttttaccatgttgcccaggatggtgtcaatctcctgggctcaagtgatccgcccacctcggcctcccaaattgctgggattacaggcgtgagctaccgcgccctgccacaaacgcatatcttctaacgtaccatttcatttacttgctatattcattatctgaattttctcatattagaatgtaagcagaataaaggcagtgatttttctttttactggcgatcctcagagccaagaagagtctgggacatagcaggccatataaatgttttcgaatgagtgaatcatcaacgagtggatgaaacgataatgtggctaacaggcagcagtaaggaggctgtgtagaataaacccgtaatcccgatgttggcagtttgcttagaaagaaaaagggaggcagtcggagaggggcacacgttttaacaaaatactgggaggaggaggaaggctagttttttttttgttttcaagtttccttctgatgttactcccatgcttccgggcacattacgagctcagtgcctgccggaaatctcccacctggtggcaacctacccttgcatacaccccacccaggggcttcaagccttgcagctgagtaaacacagaaaggagctctactaaggatgcgcgtctgcgggtttccgcgcgacctaggcgcaggcatgcgcagtagctaaagtcaccagcgtgcgcgggaagctgggccgcgtctgcttatgattggttgccgcggcagactcccacccaccgaaacgcagccctggaagctgattgggtgtggtcgccgtggccggacgccgctcgggggacgtgggaggggaggcgggaaacagcttagtgggtgtggggtcgcgcattttcttcaaccaggaggtgaggaggtttcgacatggcggtgcagccgaaggagacgctgcagttggagagcgcggccgaggtcggcttcgtgcgcttctttcagggcatgccggagaagccgaccaccacagtgcgccttttcgaccggggcgacttctatacggcgcacggcgaggacgcgctgctggccgcccgggaggtgttcaagacccagggggtgatcaagtacatggggccggcaggtgagggccgggacggcgcgtgctggggagggacccggggccttgtggcgcggctcctttcccgcctcagagagtgggcggtgagcagcctctccagtgcggaggcacgggggcggaacgttggtgcttgtgcggattccgccgtccccaggttctgcttggctccggagggacgcccccctcagccctgaaacccgtgcctctccagccgccccggatct

SEQ ID NO: 357 - DNA, 1279 bp, Homo sapiens
agcagtaaggaggctgtgtagaataaacccgtaatcccgatgttggcagtttgcttagaaagaaaaagggaggcagtcggagaggggcacacgttttaacaaaatactgggaggaggaggaaggctagttttttttttgttttcaagtttccttctgatgttactcccatgcttccgggcacattacgagctcagtgcctgccggaaatctcccacctggtggcaacctacccttgcatacaccccacccaggggcttcaagccttgcagctgagtaaacacagaaaggagctctactaaggatgcgcgtctgcgggtttccgcgcgacctaggcgcaggcatgcgcagtagctaaagtcaccagcgtgcgcgggaagctgggccgcgtctgcttatgattggttgccgcggcagactcccacccaccgaaacgcagccctggaagctgattgggtgtggtcgccgtggccggacgccgctcgggggacgtgggaggggaggcgggaaacagcttagtgggtgtggggtcgcgcattttcttcaaccaggaggtgaggaggtttcgacatggcggtgcagccgaaggagacgctgcagttggagagcgcggccgaggtcggcttcgtgcgcttctttcagggcatgccggagaagccgaccaccacagtgcgccttttcgaccggggcgacttctatacggcgcacggcgaggacgcgctgctggccgcccgggaggtgttcaagacccagggggtgatcaagtacatggggccggcaggtgagggccgggacggcgcgtgctggggagggacccggggccttgtggcgcggctcctttcccgcctcagagagtgggcggtgagcagcctctccagtgcggaggcacgggggcggaacgttggtgcttgtgcggattccgccgtccccaggttctgcttggctccggagggacgcccccctcagccctgaaacccgtgcctctccagccgccccggatctgaacttgtgatcacggagtgtttacgtcgtgccaggcattttaatgcattgttctagttcattttccagcagtcgcattcctcgccttggccctacatgtagcgctcattacaaacacggccagaatctcttattaacaaacagcagccaggagtgagatttaaaatagactgggggtttaggagacccttttatgacacgtaattctgctcccacgacgctcccatttataccgccggtccagctaagggtctggtaatggagcgccgttgaagagca

SEQ ID NO: 358 - DNA, 1155 bp, Homo sapiens
tttgaattaatgctgaaatgagttaaggctttgggggactgttgggaatgcatgattggttttgaaatgtgaggacatgagatttgggaggggtcatggcagaatgatatggtttggctatgtccccacctaaatcccatcttgaattcccatgtattgtgggagggacctggtgggagatagttgaatcatggggatggatctttcccatgctgttgtgatagtgaataagcctcatgagatctgatggttttaaaaacggaagtctacctgcacaagctctttctttgcctgctgccatccatgtaagacatgacttgttcctccttgccttctgccatgattgtgagacctccccagccatgtggaactataagtccagtaagcctctttttcttcccagtctcgggtatgtctttatcagcagcatgaagtccagctaatacagtgcttgaacatgtaatatctcaaatctgtaatgtactttttttttttttaaggagcaaagaatctgcagagtgttgtgcttagtaaaatgaattttgaatcttttgtaaaagatcttcttctggttcgtcagtatagagttgaagtttataagaatagagctggaaataaggcatccaaggagaatgattggtatttggcatataaggtaattatcttcctttttaatttacttatttttttaagagtagaaaaataaaaatgtgaagaatttaattgtgttttagtattttaagtagattgtgatagtagaatggtttgagacactttaatagcaattagcatgtggtttttaaaaagttgcagtttggctggtcgcagtggctcatgcttgtaatcccagtattttgggaggctgaggcaggtaggttgcctgagcccaggagttcaagaccagcctgcccaacgtggtaaagccccatctctactgaagataaaaaaatttaaaaaaattagctggggctattggcacacacctgtggtcccagctaatcaagaggatgaggttagaggatcacttgagcccaggaggttgaggttacagtttaactttcagaggccaaggcaggaggattgcttgagtccaggagtttgagaccaccctggggaatgtagggagatcccatctctatagagggatagattaga

SEQ ID NO: 359 - DNA, 1279 bp, Homo sapiens
cctcgtgatccgcctgccttggcctcccaaagtgttgggattacaggcgtgagccacagcactcagccagttatttttttataagaaaacattttactggccaggcctggtggctcacacctgtaatcccagcactttgggaggccgaggcaggcggatcacgaggtcaggagttcgagaccagcctggccaacatggtgaaaccccatctctactaaaaatacaaaaattagccaggcgtggtggtgtgcgcctgtattcccagctactggggaggctgaagcaggagaatcgattgaacccttgaggcagaggttgcagtgagttgagatcgcaccattgcactctagcctgggtgacagagcaagacttcatctcaaaaaaaagagaaaacattttattaataaggttcatagagtttggatttttcctttttgcttataaaattttaaagtatgttcaagagtttgttaaatttttaaaattttatttttacttaggcttctcctggcaatctctctcagtttgaagacattctctttggtaacaatgatatgtcagcttccattggtgttgtgggtgttaaaatgtccgcagttgatggccagagacaggttggagttgggtatgtggattccatacagaggaaactaggactgtgtgaattccctgataatgatcagttctccaatcttgaggctctcctcatccagattggaccaaaggaatgtgttttacccggaggagagactgctggagacatggggaaactgagacaggtaagcaaattgagtctagtgatagaggagattccaggcctaggaaaggctctttaattgacatgatactgtttcatttaaggaaaaataataaaaaaactcttttttttgtatctaattaaaataatgttctgatgtttacagaaactttgtatatttaattggacattagaacaagctgtttgttgtgtaagatttattttacctcagatcttttctcccccctttcctttctgtcttgtgttccaaaagagtaattattacggtaaatattactgtaattatggatttatcaaataagatgcagttctttagcattttttgataaatcgagtggaactttagcctgttattttactatttgttttattttaactaaattctgattgtgtcattttttttttttttttttgggaccgagtctcgctctgtcgcccaggctggagtgcagtggtgcgatctcggctcactgcaacctctgcctcccaggttcaagcaat

SEQ ID NO: 360 - DNA, 1147 bp, Homo sapiens
aagctgaggcggccggatcacctgaggtcagggattcgagaccagcctgtccaatgtgctgaaaccctgtctctactaaaaatgcaaagaaaaaaaaaatctagccaagcatggtggcttgctcctgtaatcctagctacttgggaggctgaggcaggagaattgcttgaacctgggaggcagaggtagcagtgagccaagatcgtgtcaccgcattccatcctgggcgacagtgagactctgtctcaaaacaaaaaaagagttgttaccgttgggactattttttgaaagctttatgtgaacgtaattttatattttgatgaaaatttagtttattgatgtaaaaagtgtatcagtacatcatatcagtgtcttgcacattgtataaacatttaatgtaggtgaatctgttatcactatagttatcaatgttataattttcatttttgcttttcttattccttttctcatagtagtttaaactatttctttcaaaatagataattcaaagaggaggaattctgatcacagaaagaaaaaaagctgacttttccacaaaagacatttatcaggacctcaaccggttgttgaaaggcaaaaagggagagcagatgaatagtgctgtattgccagaaatggagaatcaggtacatggattataaatgtgaattacaatatatataatgtaaatatgtaatatataataaataatatgtaaactatagtgactttttagaaggatatttctgtcatatttatctcaaaacctaaactgtgtatcaatgatattaagcttttttttttttttgagacagagtttcacttttgttgcccaggctggagtacaatggcgcgatcttggctcaccacatcctctgcctcccaggttcaagtgatcctcctgccttggcctcctgagtagctgggattacaggcatgtgccaccacgcctggctcatcttttttgtatttttagtagagatggggtttctctatgttggtcaggctggtctcaaactcctgaacctcaggtgatccgcccgcctcgggcttccaaagcgctgagattgcaggcatgagccactgtgtctggcctatttttatagtttatgtacttggaattatataatatattctgcctagcttc

SEQ ID NO: 361 - DNA, 1150 bp, Homo sapiens
gttcagaattaaggcactggctgatctgttgtctggtgagggcccacttgttcatagataaccattttctcactctaacctcacaaggttgaaagggcctaatttttgtgtttttagtagagacggggtttcactatgttggctaggctggtctcaaactcctagcctcgagtcatccacccgcctcgtcctcccggagtgcttggattacagcatgagccactgcgcccggcccccattttagttttgatggacatttgggtaattttcttttttggctattctaaataatgctgcaattactgttaattttcaccttgtaaaaaccattttcaaatctcaagagattaacctttagttttcttggtttggattgggaaggaacaccaaggaaaatgagggacttcagaatttattttcattttgcatttgttttttaaaatctttagaactggatccagtggtatagaaatcttcgatttttaaattcttaattttaggttgcagtttcatcactgtctgcggtaatcaagtttttagaactcttatcagatgattccaactttggacagtttgaactgactacttttgacttcagccagtatatgaaattggatattgcagcagtcagagcccttaacctttttcaggtaaaaaaaaaaaaaaaaaaaaaaaaaaagggttaaaaatgttgaatggttaaaaaatgttttcattgacatatactgaagaagcttataaaggagctaaaatattttgaaatattattatacttggattagataactagctttaaatggctgtatttttctctcccctcctccactccactttttaacttttttttttttaagtcagagtctcacttgttccctaggccagagtgcagtggcacaatctcagcccactctaacctccacctcccaagtagttgggattacagttgcctgccaccatgcctggttaatttttatatttttagtagggttgcggggacagggtttcaccatgttggccaggttggtctcaaacttctgaccttaggtgatcctcccacctcggcttcccaaagtgctgggattacaggcttgagccatcgtgcccagcctactttttacttttttagagactgggcttggtggagtgaagt

SEQ ID NO: 362 - DNA, 1134 bp, Homo sapiens
cgtggctcatgcctgtaatcccaacgctttgggagtccagggtgggaggatgacttgaggccaggagttgagaccagcctgggcaacatagtgagactctgtctctacaaaagaaaaaattagcggggcttagtggcgtgcgcctgtagtctcagctactcgaaaggctgaagtgggaggattctttgagccccaagggttctggcttgccgtgagccaggatggcaccactgcactccagtctgggcaatagagtcagaccctgtctcaacaaataaaataaaactgtagtaattataaagtggttttggctgggggagaaatgtacagttgaacatacggattaagaggttgaaagttggtcttaggaagaggaactttttgtggaaatttcttaatatttgaagaatattatgttattgttcctctgtttttcatggcgtagtaaggttttcactaatgagcttgccattctttctattttattttttgtttactagggttctgttgaagataccactggctctcagtctctggctgccttgctgaataagtgtaaaacccctcaaggacaaagacttgttaaccagtggattaagcagcctctcatggataagaacagaatagaggagaggtatgttattagtttatactttcgttagttttatgtaacctgcagttacccacatgattataccacttattgtaatatgcagttttggaagtatatgttaccatttaactgtacagagtacatagtaatagagtggtaattatttagattgattaaagaactcatttttttaaataagttttttttttttcactataaaagtttattttatttgagatggtatggtatcgaacatgttcatattgtgtgtaatcgtgggtaaattactcaacctttatgtcatagtttcttcacctttaaaatgacattaataaaagagctacttaataggattataagcatgagatgatttaatatacataaaatacttacagtctgatatataggaagcacttaactctttatcctagaaaagatttaaggtgaccttaacatatatgtcagaaaatctttaaaattgtggaaataaaaggttgtataattctgctatcctaaaatta

SEQ ID NO: 363 - DNA, 1200 bp, Homo sapiens
cttgagatctgcccaccgtggcttcccaaaatgctgggattataggcgtgagccaccgcacctagcctagattcaggctgcttctttttttttttttttttgagacagagtcttgctcttgttgcccaggctggagtgccatggcatgatctcagtgcaccacaatctctgcttcccaggtttaagcgattctcctgcctcagcctcccaagtagatgggatcacaggcatgagccaccatgcctggctaattttgtattttttgtacagacggggtttctccatgttggtcaggccagtctcgaactccctacctcaggtgatctgcctgcctcggcctctcaaagtgctgggattacaggtgtgagccactgcgcccagcagattcaagctttttaaatggaattttgagctgatttagttgagacttacgtgcttagttgataaattttaattttatactaaaatattttacattaattcaagttaatttatttcagattgaatttagtggaagcttttgtagaagatgcagaattgaggcagactttacaagaagatttacttcgtcgattcccagatcttaaccgacttgccaagaagtttcaaagacaagcagcaaacttacaagattgttaccgactctatcagggtataaatcaactacctaatgttatacaggctctggaaaaacatgaaggtaacaagtgattttgtttttttgttttccttcaactcatacaatatatacttggcaatgtgctgtcctcataaagttggtggtggtgactcactcttaggacacattcagatttcttttttttttttttttgagaaggagtcttgctccgttgccaaggctagagtgcagtggcacaatctcagctcactgcaacctctgcctcctgggttcaagcgattctcctgcctcagcttcctgagtggctgggattacaggcatgtgccaccatgcccggctaatttttgtacttttagttttaccatgttggccaggttcgtctggaactcccaatctcaggtgacccacctgcctcggcctcccaaagtgctgggagtacaggcgtgagccacagagcctggccatgttcagacttctaataacaggtttgtattgactcttagcctcatggcagaagccaagagacatgagacagcttagaaatttttgctttttggaaa

SEQ ID NO: 364 - DNA, 1110 bp, Homo sapiens
gggattataggcatgagccatcatgtccggcctccccatcatgtacccttaaataccatcaagcacagttccattgtgtaaaaacttggcttgatttaacctgttaattggaacactgtcattaatggaaattaggaatatgaggtaagctagaggttttattttaatgactttgggttattaaatctataagaaatgaaattcatttagtcataattaatgtcatgtttctgcatctatattacttgttgggtttacagacgaggtagtgtattattagtgggaagctttgagtgctacatcatctccctttctataaaataaattgagtacgaaacaatttgaattaaaacacctgagtaaatagtaactttggagacctgctgtactatttgtaccttttggatcaaatgatgcttgtttatctcagtcaaaattttatgatttgtattctgtaaaatgagatctttttatttgtttgttttactactttcttttaggaaaacaccagaaattattgttggcagtttttgtgactcctcttactgatcttcgttctgacttctccaagtttcaggaaatgatagaaacaactttagatatggatcaggtatgcaatatactttttaatttaagcagtagttatttttaaaaagcaaaggccactttaagaaagtttgtagatttttctttttagtatctaattgtagcacctttgtggacagtggatgtaatattaagtgacagatgggaaaaggatttttaaaaaaatagcaactgtttcagtggatgaaataaagattattagcagagaaaatgaatattgggcataactgtcctggtgaaagacaatctcataaatgaacaatttcataatttcgtaaatgcaactgcattttattttcaaagagaaggaaaattatagtcactggaaacggaaagagaagttagaggtaaacataggacacacaagaaaactttcattttgtttattttcttgtttttcttttgagacagggtttccctctgttacccaggcttaagtgcagtgacactatcatagttcactaacccctcaaattcctgggttcaagtaatcctcctgcctta

SEQ ID NO: 365 - DNA, 1124 bp, Homo sapiens
attactggtaagaatttagtgaaacaaagtacttaagagtatgtctttaaattgtgagattttgatgaacttttaagaaataaaattctttagtttcttagagctttttgagatttctaaggtagatccttggtttgggcaacatataactattacaagttttgcacattgaacgttatttggtaatttttagagaggacattttaaatgtttaggaaaaatataaataaaatgtagaatactattgggggcatatacatcatcagcactgtaactgtttcatatgaatcatttttgtacatatagaactctaaagtcctaatgaacagaattttacatttctataaatagaaagtccttaatagttgtgactgaataacttatggatagcaaattatttaactgaaaacagtaaaatttaagtgggaggaaatatttgctttataatttctgtctttacccattatttataggattttgtcactttgttctgtttgcaggtggaaaaccatgaattccttgtaaaaccttcatttgatcctaatctcagtgaattaagagaaataatgaatgacttggaaaagaagatgcagtcaacattaataagtgcagccagagatcttggtaagaatgggtcattggaggttggaataattcttttgtctatacactgtatagacaaaatattgatgccagaattattttataagttccctgtccccaagatgatgacttcacatctctgtcaaacagaaatcgcccaacaggcccttgtatgatgtcatttaaacaagccctattttaaatgtcacctccactggtaacaggatactcctaggaggatcaccaagcccaattcttctaggagtagtgcattgattaggctttggggtttccaagcagttcattaatgtcacttttggaaaaagtctgtctttcataccagcttattaattccctatgggttcacacggttttttttcctggattttcatcaaacatgtgtaaggtactcagtacaaagaagtttagaaatccagaacaaagcagtgtatttaagtagtagtaaacttccagataatctgatgcccatatctacatatataaaaaatttgcaaatagtt

SEQ ID NO: 366 - DNA, 1151 bp, Homo sapiens
aacagaaaatatgtgcactagttttcctagagtttcattgtcagagtctcaagtttttgtttggaaattgtatttggtcacattaattatactctatgttagttccaaagaaatacctttggttaagaaaagaattctcatgcataactcctcgagggtggggttacaccttaatccatcctcaggtgctcatggtaattggggcaaatatgttgcccagtgctggtgctctgcagccttggatgggtttacccagaaagcagctttcaagtcagaaactaacattcataagggagttaaggattttataaatagatatccataattcatgtagttttcaagtaagtagtatttgaatcttttctggttagataataattgtgagtatgttgtcatataataacagtatgtttttcactatttaaataattttagaattacattgaaaaatggtagtaggtatttatggaatactttttcttttcttcttgattatcaaggcttggaccctggcaaacagattaaactggattccagtgcacagtttggatattactttcgtgtaacctgtaaggaagaaaaagtccttcgtaacaataaaaactttagtactgtagatatccagaagaatggtgttaaatttaccaacaggtttgcaagtcgttattatatttttaaccctttattaattccctaaatgctctaacatgatgtgaatgttctatgataagttttactaatgtagtcatcaggtaagagtcaagctttcttccatagagcagtcagctgtcgcaacaccatttgttaaatagtccgtctgttctccattgactgaagtggtactttgggtctattttaaagactctacttttacctcgtctcaccattcttttgtctacacaaaatatattttatcgcttattctgtgttaccatatctattagagctagttccccctcatatctctgctttagttattttcacatgtttcttttatcttttttttttttggagatggagtctcgctctgttgcccaggctggagtgcagtggcatgatctcggctcactgcaagctccgccttccgggttcacgccattctcctgcctcagcctcccgagtagctgggactacaggcgcccgccactgcg

SEQ ID NO: 367 - DNA, 1098 bp, Homo sapiens
tgggattacaagcacgcgccaccatgctgggctaatttttgtatttttagtagagacggggtttctccatgttggtcaggctggtctcgaactcctgacctcaggcaatccaccgacctcaggtgatccacccgcctcagcctcccaaagttctggggttacaggcgtgagccaccacgcccggctgtcttcaatcttaaataaggattccatttaaatattttgtaaaaggacacagatcacagttttactcaggggaatataattgttatagcaggaattgtgccattgcgctattccaaacagtgtaaaagaacattaataaattgaattctaactacatttgtccctaaggagttgttcgttttccacttgtatttccattttaattatcattatttggatgtttcataggatactttggatatgtttcacgtagtacacattgcttctagtacacattttaatatttttaataaaactgttatttcgatttgcagcaaattgacttctttaaatgaagagtataccaaaaataaaacagaatatgaagaagcccaggatgccattgttaaagaaattgtcaatatttcttcaggtaaacttaatagaactaataatgttctgaatgtcacctggcttttggtaacagaagaaaaatcatgatatttgaagtgtgttttgttattttcgcaagccattacattctgactatttaatatgttaggtttcctatataaaataaggcatggtatgttacagtaggacacataactggaagttactcttgcacatagaaacaaaaaatggcagaaaagcacaaaacttactatagttgtaacagggaaaggaaacactagggcctacaacgtactaatgtcttgggtcatctatgggctcatgaggctctaggttatggaagtaaataccactgaaaagcaaatattaattacacatgaggcaagcctttttgagttctgtatgtcattttgtagattttgagttcattctagtggcaccatttgagatcattttcatgtaattaaaggaacacagcaacctggcactgtgttattgcccttagaatggaatgaatat

SEQ ID NO: 368 - DNA, 1246 bp, Homo sapiens
ctcagcttactgcaacttccaccttctgggttcatgcaattctggtgcctcagcctcccaagtatctgggtttacagacatgcaccaccatacctggctaatttttgtatttttggtagagatggggtttcgccgtgttaccaggctggtcttgaattcctggccccatgtgatcccccggcctcatgcgatctgcccgcctcagcctccctaagtgctgggattataggcgtgagccacccaacccagccagtactctgtttttgatagctattcacaatgggaaaggatgtagcaacacattttaaccctatgttgagttttaggtgggttcctttgaaattttgttaaggctaacttttgttaatttttttaaaaaagtgtaaattaggaaatgggttttgaattcccaaatggggggattaaatgtatttttacggcttatatctgtttattattcagtattcctgtgtacattttctgtttttatttttatacaggctatgtagaaccaatgcagacactcaatgatgtgttagctcagctagatgctgttgtcagctttgctcacgtgtcaaatggagcacctgttccatatgtacgaccagccattttggagaaaggacaaggaagaattatattaaaagcatccaggcatgcttgtgttgaagttcaagatgaaattgcatttattcctaatgacgtatactttgaaaaagataaacagatgttccacatcattactggtaaaaaacctggtttttgggctttgtgggggtaacgttttgtttttttttttttttttttaatcttggagtagaaatatatttaaaattgatggagaaaattcccagttcttaacattagaaagggaatatattattcttaccagttagtaatctattcacatttggtttagagggaagatttagaaggtgagataaaagcttgtgagagaatagtgtattcatgtgaaacttcttccatgggttcagagcatttagaaacaaacatcccttcacactcaaagcttacctttgagccagtcctccaatagtgaggtctttgaaggtcaggccaaattggctgtgggaggacctcaggttaggataggaattattttaagacatggcactatattcatgtgaaactcgcaaaaactagccttgcatataggctcatgtatcatgtctcagctgagatgtttgagagatcttaactagattctagaaaacaaaaaaggaag

SEQ ID NO: 369 - DNA, 1205 bp, Homo sapiens
aattgcctgtttttcaaaagaaagatcatgtcttcaggtttttgtgtggggtttaaatgattcgaaagatttgaccatactgatacattcactagtaaccttagttactaatgagtaatggttttgagttaatcagttaggcctgaactacttttctggaagttagtaaattatctcacaggcagccctgtgagccatgggaaaatgtgtatatggtctttctaggccacagtcaaattacaggtatatttgtcatggcttctcttgatgaaaggcccagtatcggtttgtctgaagatatataatagcattgcttttgggggtaatatgggcagtaactctgtccacatctttgggcaggctgtggttctgcctttatatgctatgtcagtgtaaacctacgcgattaatcatcagtgtacagtttaggactaacaatccatttattagtagcagaaagaagtttaaaatcttgctttctgatataatttgttttgtaggccccaatatgggaggtaaatcaacatatattcgacaaactggggtgatagtactcatggcccaaattgggtgttttgtgccatgtgagtcagcagaagtgtccattgtggactgcatcttagcccgagtaggggctggtgacagtcaattgaaaggagtctccacgttcatggctgaaatgttggaaactgcttctatcctcaggtaagtgcatctcctagtcccttgaagatagaaatgtatgtctctgtcctgtgagaaggaaaagtatatttgcagattctcatgtaaaaacatctgagaatgtttgtcttagtttaatagttgttttcctgtggactttatatactttgtattgtcttaaaagagtgattgatggtagctacggaaaactttgatttttaaaattgtctctttaagtagacaatttataagctactggtacgagttcaccttataaatctccactaccatgtttttgcttggactgttcacacttcctggaatggtccttcttgccgtttatccaacttctttctaatttttaagtccctaatgatgggaattctatttctgtagtgatttttctggtcatacgaccgtaaggtcatgggtgtttttctctgaattcctcttgagatgcctgtaacttgaaccacgtttttattctagacattactgaaatgttttgtctttatttcact

SEQ ID NO: 370 - DNA, 1248 bp, Homo sapiens
tgataatgtaaaacaatattcaaaatctgtttttcctttcatccgttgtttgttcatgttcatgacctttttttttttttcctattctcctccctccctccctccctccctcccttccttccttccctccttccctccttccctccctccctcccacacaaaggtgtgtgctaccatacctggctagtttttaatttttttttttttttttttttttagaggcaaggtctcactatgttgctcaggctggtctgggctcaagtgatcctcccacctccgccttccaaagtgctgggattacagacgtgagccatcatgcctggcccttgcccatttttctattgaagttttagtgctttttattgactttgtttatatattaagataatccattatgtttgtggcatatccttcccaatgtattgtcttaattttgtttttgtatgtgtatgttaccacattttatgtgatgggaaatttcatgtaattatgtgcttcaggtctgcaaccaaagattcattaataatcatagatgaattgggaagaggaacttctacctacgatggatttgggttagcatgggctatatcagaatacattgcaacaaagattggtgctttttgcatgtttgcaacccattttcatgaacttactgccttggccaatcagataccaactgttaataatctacatgtcacagcactcaccactgaagagaccttaactatgctttatcaggtgaagaaaggtatgtactattggagtactctaaattcagaacttggtaatgggaaacttactacccttgaaatcatcagtaattgccttattctaagttagtataaattattgatgttgttatagaacccatttaccccttaattcacagtctgggggtaggaacatgtacatcatatttctgtatctcatagtaggaccactcattctaaagcattcacagaaagaattatctgtactctttttgggacagaatctcgttctgttgcccaggctggagtgcgatctcggctcactgcaacctccgcctcccgggttcaagcgattctcctgcctcagcttcccgagtagctgggattacaggcgcctgccaccacacctggctaatttttatatttttagtagagacggggtttcaccatgctggccaggctggtctcgaattcctgacctcaggcaatccacccgtctcggcctcccaaagtgctgggattacaggtgtgagccacc

SEQ ID NO: 371 - DNA, 1176 bp, Homo sapiens
ccctcctcttcctccttcccttcccccttcctccttcccttcccccttcctccttccctttcctcttccctttccccttcccttcccccttcccttccctcttcccttccccttcccctttcccctccccctctcctcccctcccttaccttcccatgaaatgagaaagcctcagagatagtggcttgattaatttttctttagattaagatatttgtctaagcctttaaggtttatctattgagcttttttgtctcctatttttatttttcctactatgtttgtcgaggataaaatacagcactgtgtgccaagtcataatcacttttcatttgagacttaattaaaatgcctttattttaatgatatatttggctaatgtatttgaagtaatccgaaattaagttttctaatgacaaggtgagaaggataaattccatttacataaattgctgtctcttctcatgctgtcccctcacgcttccccaaatttcttataggtgtctgtgatcaaagttttgggattcatgttgcagagcttgctaatttccctaagcatgtaatagagtgtgctaaacagaaagccctggaacttgaggagtttcagtatattggagaatcgcaaggatatgatatcatggaaccagcagcaaagaagtgctatctggaaagagaggtttgtcagtttgttttcatagtttaacttagcttctctattattacataaacaggacactaagatgaaggttttttgttgttgtttgttttcctctgtgtttctagtgcttattttttaatcagtttttttgatggcaaagaatctatctctgtgttattttgatttctgcagtatatacatctgcatgatcaatattcgatttcaagtaccaaagtaggagtaaaggaatattaacctaggtttaaaattagtcatttcactaaaattagttattatggacgatagatgtctaggtatatctttgttcataaacgaatatatcaagttcagttattaaattacacattaggtaagaaaaggacaaagaaataaaaaagcatgattcataattcctgccctctatttgtctagaatttagttgggaagataagaataacgaacgtgacacagagaataaagtggcatatgacaaatatttattcaagaaagctatatgt

SEQ ID NO: 372 - DNA, 1443 bp, Homo sapiens
gtgaggttggtaacattattcccattttatgaatgaggaatgtgtgttaaggagtttgcccaagagtcacatagcaagtcatagtcatgctctctgaagcagcaataacttggcaataaaataaaaatgaagcatcttctgtatgtgttaacttttcagtgactgtttatgccttccagtattctttgtaaaccttgaattctttttttcacagatgattaaagtttatcaattgtaaaggtggaggaatttgggaactagacagtgcacacataaataataaatatgttcttcaaatattgggtgggctaatgtgggaggagtttgagaccagcctgggcaacatagtgagaccctcgtctctaaaaatatgaaaaataaaaaaaaaattttttaaatgtgtgatatgtttagatggaaatgaaacaatttgtcactgtctaacatgacttttagaaaagatattttaattactaatgggacattcacatgtgtttcagcaaggtgaaaaaattattcaggagttcctgtccaaggtgaaacaaatgccctttactgaaatgtcagaagaaaacatcacaataaagttaaaacagctaaaagctgaagtaatagcaaagaataatagctttgtaaatgaaatcatttcacgaataaaagttactacgtgaaaaatcccagtaatggaatgaaggtaatattgataagctattgtctgtaatagttttatattgttttatattaaccctttttccatagtgttaactgtcagtgcccatgggctatcaacttaataagatatttagtaatattttactttgaggacattttcaaagatttttattttgaaaaatgagagctgtaactgaggactgtttgcaattgacataggcaataataagtgatgtgctgaattttataaataaaatcatgtagtttgtggaatttgagatgcattgtagttcttcgcagtgtgacttcaaatattttggaagaaacaaatagctcagagacctcgtaaaatatcttaaactggagggctccatggagatcattgcgagtgactcccccagaatgtccatctgttgacaggagccaggctggctgcatacgaattagctaaggagcttattatatatccagagtcctaccgtgagcctccatcccgtctgccattctcccatccctggtctatgataagacttagaaatctggattttaacaaaacgtttcagattgagaaccttgatttagtctacttctcctattttacaataaagagatgaagcggttaagaattagctaatcctacgcaaagtgagggaaaaaggacagtctttttaataaatgcggcgggctggtggggtatccatataggaagaaatgacattggacccctactccatgtcatatataaaaacctccactttgggaggcgaagca

SEQ ID NO: 373 - DNA, 1500 bp, Homo sapiens
acatgacttttagaaaagatattttaattactaatgggacattcacatgtgtttcagcaaggtgaaaaaattattcaggagttcctgtccaaggtgaaacaaatgccctttactgaaatgtcagaagaaaacatcacaataaagttaaaacagctaaaagctgaagtaatagcaaagaataatagctttgtaaatgaaatcatttcacgaataaaagttactacgtgaaaaatcccagtaatggaatgaaggtaatattgataagctattgtctgtaatagttttatattgttttatattaaccctttttccatagtgttaactgtcagtgcccatgggctatcaacttaataagatatttagtaatattttactttgaggacattttcaaagatttttattttgaaaaatgagagctgtaactgaggactgtttgcaattgacataggcaataataagtgatgtgctgaattttataaataaaatcatgtagtttgtggaatttgagatgcattgtagttcttcgcagtgtgacttcaaatattttggaagaaacaaatagctcagagacctcgtaaaatatcttaaactggagggctccatggagatcattgcgagtgactcccccagaatgtccatctgttgacaggagccaggctggctgcatacgaattagctaaggagcttattatatatccagagtcctaccgtgagcctccatcccgtctgccattctcccatccctggtctatgataagacttagaaatctggattttaacaaaacgtttcagattgagaaccttgatttagtctacttctcctattttacaataaagagatgaagcggttaagaattagctaatcctacgcaaagtgagggaaaaaggacagtctttttaataaatgcggcgggctggtggggtatccatataggaagaaatgacattggacccctactccatgtcatatataaaaacctccactttgggaggcgaagcaggcaatcacttgaactcaggagatcaagaccagcctggacaacatgacgaaaccccatctctacaaaaataaatgcaaaaattagccgggcatagtggtgcttgcctgtagtcccagctactcaggaggctgaggtgggaggatcacgtgatctgggagaggttgaggttacagtgagctgcactccatcctgggtaatacagtgataactgtgtctcaaacaaaacaaaacaaatcaccttcagtgatttttagaccaaatgtacaaggtaatactctcaaggttttaatgttttatagttctgcagaagataacataggaaaatatttttatgtccttggctttgggaagaatttaagtcacagaaaaacaccatccataaagtttgacttatttagctatttgaaattaacaacttctattaaaaggcaccacaagtgaaaagacatgaatcgtaatggaagaacatactggtacgttataaaatatcaaagagttg

SEQ ID NO: 374 - DNA, 4435 bp, Homo sapiens
ggcgaggcgcctgttgattggccactggggcccgggttcctccggcggagcgcgcctccccccagatttcccgccagcaggagccgcgcggtagatgcggtgcttttaggagctccgtccgacagaacggttgggccttgccggctgtcggtatgtcgcgacagagcaccctgtacagcttcttccccaagtctccggcgctgagtgatgccaacaaggcctcggccagggcctcacgcgaaggcggccgtgccgccgctgcccccggggcctctccttccccaggcggggatgcggcctggagcgaggctgggcctgggcccaggcccttggcgcgctccgcgtcaccgcccaaggcgaagaacctcaacggagggctgcggagatcggtagcgcctgctgcccccaccagttgtgacttctcaccaggagatttggtttgggccaagatggagggttacccctggtggccttgtctggtttacaaccacccctttgatggaacattcatccgcgagaaagggaaatcagtccgtgttcatgtacagttttttgatgacagcccaacaaggggctgggttagcaaaaggcttttaaagccatatacaggttcaaaatcaaaggaagcccagaagggaggtcatttttacagtgcaaagcctgaaatactgagagcaatgcaacgtgcagatgaagccttaaataaagacaagattaagaggcttgaattggcagtttgtgatgagccctcagagccagaagaggaagaagagatggaggtaggcacaacttacgtaacagataagagtgaagaagataatgaaattgagagtgaagaggaagtacagcctaagacacaaggatctaggcgaagtagccgccaaataaaaaaacgaagggtcatatcagattctgagagtgacattggtggctctgatgtggaatttaagccagacactaaggaggaaggaagcagtgatgaaataagcagtggagtgggggatagtgagagtgaaggcctgaacagccctgtcaaagttgctcgaaagcggaagagaatggtgactggaaatggctctcttaaaaggaaaagctctaggaaggaaacgccctcagccaccaaacaagcaactagcatttcatcagaaaccaagaatactttgagagctttctctgcccctcaaaattctgaatcccaagcccacgttagtggaggtggtgatgacagtagtcgccctactgtttggtatcatgaaactttagaatggcttaaggaggaaaagagaagagatgagcacaggaggaggcctgatcaccccgattttgatgcatctacactctatgtgcctgaggatttcctcaattcttgtactcctgggatgaggaagtggtggcagattaagtctcagaactttgatcttgtcatctgttacaaggtggggaaattttatgagctgtaccacatggatgctcttattggagtcagtgaactggggctggtattcatgaaaggcaactgggcccattctggctttcctgaaattgcatttggccgttattcagattccctggtgcagaagggctataaagtagcacgagtggaacagactgagactccagaaatgatggaggcacgatgtagaaagatggcacatatatccaagtatgatagagtggtgaggagggagatctgtaggatcattaccaagggtacacagacttacagtgtgctggaaggtgatccctctgagaactacagtaagtatcttcttagcctcaaagaaaaagaggaagattcttctggccatactcgtgcatatggtgtgtgctttgttgatacttcactgggaaagtttttcataggtcagttttcagatgatcgccattgttcgagatttaggactctagtggcacactatcccccagtacaagttttatttgaaaaaggaaatctctcaaaggaaactaaaacaattctaaagagttcattgtcctgttctcttcaggaaggtctgatacccggctcccagttttgggatgcatccaaaactttgagaactctccttgaggaagaatattttagggaaaagctaagtgatggcattggggtgatgttaccccaggtgcttaaaggtatgacttcagagtctgattccattgggttgacaccaggagagaaaagtgaattggccctctctgctctaggtggttgtgtcttctacctcaaaaaatgccttattgatcaggagcttttatcaatggctaattttgaagaatatattcccttggattctgacacagtcagcactacaagatctggtgctatcttcaccaaagcctatcaacgaatggtgctagatgcagtgacattaaacaacttggagatttttctgaatggaacaaatggttctactgaaggaaccctactagagagggttgatacttgccatactccttttggtaagcggctcctaaagcaatggctttgtgccccactctgtaaccattatgctattaatgatcgtctagatgccatagaagacctcatggttgtgcctgacaaaatctccgaagttgtagagcttctaaagaagcttccagatcttgagaggctactcagtaaaattcataatgttgggtctcccctgaagagtcagaaccacccagacagcagggctataatgtatgaagaaactacatacagcaagaagaagattattgattttctttctgctctggaaggattcaaagtaatgtgtaaaattatagggatcatggaagaagttgctgatggttttaagtctaaaatccttaagcaggtcatctctctgcagacaaaaaatcctgaaggtcgttttcctgatttgactgtagaattgaaccgatgggatacagcctttgaccatgaaaaggctcgaaagactggacttattactcccaaagcaggctttgactctgattatgaccaagctcttgctgacataagagaaaatgaacagagcctcctggaatacctagagaaacagcgcaacagaattggctgtaggaccatagtctattgggggattggtaggaaccgttaccagctggaaattcctgagaatttcaccactcgcaatttgccagaagaatacgagttgaaatctaccaagaagggctgtaaacgatactggaccaaaactattgaaaagaagttggctaatctcataaatgctgaagaacggagggatgtatcattgaaggactgcatgcggcgactgttctataactttgataaaaattacaaggactggcagtctgctgtagagtgtatcgcagtgttggatgttttactgtgcctggctaactatagtcgagggggtgatggtcctatgtgtcgcccagtaattctgttgccggaagataccccccccttcttagagcttaaaggatcacgccatccttgcattacgaagactttttttggagatgattttattcctaatgacattctaataggctgtgaggaagaggagcaggaaaatggcaaagcctattgtgtgcttgttactggaccaaatatggggggcaagtctacgcttatgagacaggctggcttattagctgtaatggcccagatgggttgttacgtccctgctgaagtgtgcaggctcacaccaattgatagagtgtttactagacttggtgcctcagacagaataatgtcaggtgaaagtacattttttgttgaattaagtgaaactgccagcatactcatgcatgcaacagcacattctctggtgcttgtggatgaattaggaagaggtactgcaacatttgatgggacggcaatagcaaatgcagttgttaaagaacttgctgagactataaaatgtcgtacattattttcaactcactaccattcattagtagaagattattctcaaaatgttgctgtgcgcctaggacatatggcatgcatggtagaaaatgaatgtgaagaccccagccaggagactattacgttcctctataaattcattaagggagcttgtcctaaaagctatggctttaatgcagcaaggcttgctaatctcccagaggaagttattcaaaagggacatagaaaagcaagagaatttgagaagatgaatcagtcactacgattatttcgggaagtttgcctggctagtgaaaggtcaactgtagatgctgaagctgtccataaattgctgactttgattaaggaattatagactgactacattggaagctttgagttgacttctgacaaaggtggtaaattcagacaacattatgatctaataaactttattttttaaaaatgaaaaaaaaaaaaaaaaaaaaaaaaaaaaaaaaaaaaaaaaaaaaaaaaaaaaaaaaaaaaaaaaaaaaaaaaaaaaaaaaaaaaaaaaaaaaaaaaaaaaaaaaaaaa

SEQ ID NO: 375 - DNA, 1500 bp, Homo sapiens
ttgtcgcccaggctggagtgcagtggcgcgaccttggctcactgcaaacgctgcctcccaggttcaagttattctcctgcctcagcctcccaagtagctgggattacaggcgcatgccaccacgcccggctaatttttggatttttagtagagacgggggtttcaccatgttgactaggctggtcttcaacgcctgacctcaggtgatccgcccgcctcggcatcccaaagtgctgggattacaggcgtgagccactgcgcccggcctctcatagtctcttagctttctaaaatttgaaaaatcctgtaaagacacacctgggtcaaagggctcagataacggactgtggcccttaagtacttacgtcacaggttattgagaggatcgatttagttaccagatgtaaaatgctgggatcagtgcctggcaaaggaaaactttgtacagctgcaggctttcaccatacacaacagcatcgctaacgaatgctattacaatattcatttagcgtttaccaagtgcctactctatacaaatcttgagaatacaacgtgaaggtgaactgctgactaaagtttggtccctttcgctccgtctccttgcgaaaatgctctaacggcaggaggtcacgcgagcgctggacgcgtttctccccgcgagcccctttccgaggcctttcgggtccccccggttatccccgcccgggcggtgcgcgcccccgctgttcccgcttccgctccagagaggcagggctttccgagcctgctagccccgcggccgcaactaaccccgggtcggagtgttccggcccggccagccccgcggcgtgagggaaggggagctcagcagttccccgcgcggggcccaggcgtcggcggcagggcgggcccctcaccgccagcgtgccagccccgcccctacccaccagtgtgccagccccgcccttccccacgtcgccgcgcgcccgggggcggggcctggcgcgcaccgcccgcgcacggcgaggcgcctgttgattggccactggggcccgggttcctccggcggagcgcgcctccccccagatttcccgccagcaggagccgcgcggtagatgcggtgcttttaggagctccgtccgacagaacggttgggccttgccggctgtcggtatgtcgcgacagagcaccctgtacagcttcttccccaagtctccggcgctgagtgatgccaacaaggcctcggccagggcctcacgcgaaggcggccgtgccgccgctgcccccggggcctctccttccccaggcggggatgcggcctggagcgaggctgggcctgggcccaggcccttggcgcgctccgcgtcaccgcccaaggcgaagaacctcaacggagggctgcggagatcggtagcgcctgctgcccccaccaggtagcggggtgggggtggggtcgaaggcgggggcatagcggcggggcgcttggaacccggcgaggggaggctcgcacagggggttggg

SEQ ID NO: 376 - DNA, 1412 bp, Homo sapiens
ttcatttagcgtttaccaagtgcctactctatacaaatcttgagaatacaacgtgaaggtgaactgctgactaaagtttggtccctttcgctccgtctccttgcgaaaatgctctaacggcaggaggtcacgcgagcgctggacgcgtttctccccgcgagcccctttccgaggcctttcgggtccccccggttatccccgcccgggcggtgcgcgcccccgctgttcccgcttccgctccagagaggcagggctttccgagcctgctagccccgcggccgcaactaaccccgggtcggagtgttccggcccggccagccccgcggcgtgagggaaggggagctcagcagttccccgcgcggggcccaggcgtcggcggcagggcgggcccctcaccgccagcgtgccagccccgcccctacccaccagtgtgccagccccgcccttccccacgtcgccgcgcgcccgggggcggggcctggcgcgcaccgcccgcgcacggcgaggcgcctgttgattggccactggggcccgggttcctccggcggagcgcgcctccccccagatttcccgccagcaggagccgcgcggtagatgcggtgcttttaggagctccgtccgacagaacggttgggccttgccggctgtcggtatgtcgcgacagagcaccctgtacagcttcttccccaagtctccggcgctgagtgatgccaacaaggcctcggccagggcctcacgcgaaggcggccgtgccgccgctgcccccggggcctctccttccccaggcggggatgcggcctggagcgaggctgggcctgggcccaggcccttggcgcgctccgcgtcaccgcccaaggcgaagaacctcaacggagggctgcggagatcggtagcgcctgctgcccccaccaggtagcggggtgggggtggggtcgaaggcgggggcatagcggcggggcgcttggaacccggcgaggggaggctcgcacagggggttgggggggtgcacggcctggccctgggctcggaggaggcggggccgcagagttggcttgaatgagtgcaggggtcgagtctggagcatttgggggtgtagcttgtaaacagggtcggaggagagaggctgtgcaggaagagggctgcaggggagacgcggagagttcgggccttttggagggaggagacgcgtcccgccaggtgggggtgctgggctaaggaaggggcgacgcgcgcagctccgggtggggagggggcctgggaggtgggagcactgggggtggggcgagaaggggaaggcgcccggcccacttggtgggcggggcggggggcggggtggcgggaaggaggaatgcctgcgggaggccgaacggggagagtccggtggtgtggggtgcgaaaggaggttcctcggc

SEQ ID NO: 377 - DNA, 1197 bp, Homo sapiens
gcttttggaatacataggagtgtaactggaaaaagattccaagcaagtctaatgaattagataatttacctaattagtaaattatgtaatcagtatgctttataataatattgtgagttagatcctgtttctgatatgtacataccatattgtataggtgctactaatttggagagcatatacagtgagtccatgcctttttcctgccatcagcattataccaaaattctgccatggtttttaaactttgattctgagaaagtttctcaccctaataacataactatatttgtgtttgtcttcatagttaaatatgcattatgatatcagcttgcatacattttttaaatgacttgaatatctgactttaaaaattattctagaatttctgtgcttcaatattaatgccagaagacttggaattgtttatttgtaggtaactgcctttaaggaaacttgaccaaatattaactaagttatgtatttccttttggcaacagttgtgacttctcaccaggagatttggtttgggccaagatggagggttacccctggtggccttgtctggtttacaaccacccctttgatggaacattcatccgcgagaaagggaaatcagtccgtgttcatgtacagttttttgatgacagcccaacaaggggctgggttagcaaaaggcttttaaagccatatacaggtaagagtcactactgccatgtgtgtgtgtttgtgtgtgtgtgtgtgtgtgtgagagaaacagacagacaggcagacttttttctatatgatgaaattaagtgtattttaccccagtaaattgcaaggggtggcagttgtgaaagcttctggcatgggaaagggatgtaacatggtctttagctggtttgttttgtggaatggaatttttatttctgtcctttgagtgacttacagcaatattatacccttaataagggtaaactaaactgtccccccatcttgaagggtccaagagaaagttaatgtcatcaggatacatagcctatagatagcgacattctctagggaaagatggagatgcgcactacctggccttcaaactactcactaatgaacacatctgagttgagtttcacaccaaactcctggaaccataactttcttttcccagatctagtcttgtttatcacagacatcaacagcctggcatgtttagcc

SEQ ID NO: 378 - DNA, 1170 bp, Homo sapiens
gtcaagtgtccagccaacaagttattttatgtgtgtgtgtgtgtgtgtgtgtgtgtatacatatatacatttttttttttttttttcatcgagacagggtcttgcactgtcgcccaggctggagtgaagtggtgcaatctcggctcactgcaacctctgcctcccaggtttaagtgatcttcccacctcagcctcccaagtagctgggactacaggcgcacaccaccacccttggctaatttttgtattttttttttggtagagatggggtttcaccacattgcccaggctggtcttgaattcctgacctcaagtagtccgcccacctaagcctcccaaaatgctgggattacaggcgtgagccaccacacctggcatatatatattttaagatagagatggggtttgctatgttgcccaggctggtcttgaactgctgggattacaggcgtgagcctctgcacccggcccttattgtttataaatacatttctttctaggttcaaaatcaaaggaagcccagaagggaggtcatttttacagtgcaaagcctgaaatactgagagcaatgcaacgtgcagatgaagccttaaataaagacaagattaagaggcttgaattggcagtttgtgatgagccctcagagccagaagaggaagaagagatggaggtgggacacggcaagcattcagttgttatttatgttagggtgatgggggaagaaagggggagggtgtattaacaagataccttgttttatatatgtgtgtgtatatgtattattttattatacatacatgcatacttctgtagttccctggactgtaggataagttaggttacttagaatctcaacagctagcatcgtttttacttaggttttcaagcctactggcagggtaagcaagaggtagtaccattttggtaagaagtagagagctagggacagtaaagatggagtaatatatatatgagggtatagtcaggccctagaaattaattatccagttttatgctttttataaaaaaactgagatggggtcttgctatgttgcccaggctggtctcaaactcctgagttcaagggatctgcccacctgggcctcccaaagtgttgggattacaggcatgagccacagcacccagccccagctttatgcttttaattct

SEQ ID NO: 379 - DNA, 3545 bp, Homo sapiens
ttgcaggagaactattggcatggaaaatgacaattgttttaatgtcaagtgaaactgaagttgatgttcattgagaggtttctaatttctagaggtgggttctttttttggcatatgaagttgcagcatattaagagaatttacagtagtacagatggggttatcccatccacaacttatgatggggttacataaactaaaaacgtgtttaatacacctaccccaccgaatattgtagcttgggcgtagcctaacctatctcagacgtgctcagaacacttaaatgttagcctaaagttgggcaagatcatctaacacaaagcctattttataataaggaattgcctatctcatgtaattcatcgaatactgtactaaaaatgaaaaacagtggctgcacgggtaccattataaagtcaaaaaatcataagttgaactgtcttacattatggttttccaaattttgatttgtttttaaatactctttccttgcctggcaggtaggcacaacttacgtaacagataagagtgaagaagataatgaaattgagagtgaagaggaagtacagcctaagacacaaggatctaggcgaagtagccgccaaataaaaaaacgaagggtcatatcagattctgagagtgacattggtggctctgatgtggaatttaagccagacactaaggaggaaggaagcagtgatgaaataagcagtggagtgggggatagtgagagtgaaggcctgaacagccctgtcaaagttgctcgaaagcggaagagaatggtgactggaaatggctctcttaaaaggaaaagctctaggaaggaaacgccctcagccaccaaacaagcaactagcatttcatcagaaaccaagaatactttgagagctttctctgcccctcaaaattctgaatcccaagcccacgttagtggaggtggtgatgacagtagtcgccctactgtttggtatcatgaaactttagaatggcttaaggaggaaaagagaagagatgagcacaggaggaggcctgatcaccccgattttgatgcatctacactctatgtgcctgaggatttcctcaattcttgtactcctgggatgaggaagtggtggcagattaagtctcagaactttgatcttgtcatctgttacaaggtggggaaattttatgagctgtaccacatggatgctcttattggagtcagtgaactggggctggtattcatgaaaggcaactgggcccattctggctttcctgaaattgcatttggccgttattcagattccctggtgcagaagggctataaagtagcacgagtggaacagactgagactccagaaatgatggaggcacgatgtagaaagatggcacatatatccaagtatgatagagtggtgaggagggagatctgtaggatcattaccaagggtacacagacttacagtgtgctggaaggtgatccctctgagaactacagtaagtatcttcttagcctcaaagaaaaagaggaagattcttctggccatactcgtgcatatggtgtgtgctttgttgatacttcactgggaaagtttttcataggtcagttttcagatgatcgccattgttcgagatttaggactctagtggcacactatcccccagtacaagttttatttgaaaaaggaaatctctcaaaggaaactaaaacaattctaaagagttcattgtcctgttctcttcaggaaggtctgatacccggctcccagttttgggatgcatccaaaactttgagaactctccttgaggaagaatattttagggaaaagctaagtgatggcattggggtgatgttaccccaggtgcttaaaggtatgacttcagagtctgattccattgggttgacaccaggagagaaaagtgaattggccctctctgctctaggtggttgtgtcttctacctcaaaaaatgccttattgatcaggagcttttatcaatggctaattttgaagaatatattcccttggattctgacacagtcagcactacaagatctggtgctatcttcaccaaagcctatcaacgaatggtgctagatgcagtgacattaaacaacttggagatttttctgaatggaacaaatggttctactgaaggaaccctactagagagggttgatacttgccatactccttttggtaagcggctcctaaagcaatggctttgtgccccactctgtaaccattatgctattaatgatcgtctagatgccatagaagacctcatggttgtgcctgacaaaatctccgaagttgtagagcttctaaagaagcttccagatcttgagaggctactcagtaaaattcataatgttgggtctcccctgaagagtcagaaccacccagacagcagggctataatgtatgaagaaactacatacagcaagaagaagattattgattttctttctgctctggaaggattcaaagtaatgtgtaaaattatagggatcatggaagaagttgctgatggttttaagtctaaaatccttaagcaggtcatctctctgcagacaaaaaatcctgaaggtcgttttcctgatttgactgtagaattgaaccgatgggatacagcctttgaccatgaaaaggctcgaaagactggacttattactcccaaagcaggctttgactctgattatgaccaagctcttgctgacataagagaaaatgaacagagcctcctggaatacctagagaaacagcgcaacagaattggctgtaggaccatagtctattgggggattggtaggaaccgttaccagctggaaattcctgagaatttcaccactcgcaatttgccagaagaatacgagttgaaatctaccaagaagggctgtaaacgatactggaccaaaactattgaaaagaagttggctaatctcataaatgctgaagaacggagggatgtatcattgaaggactgcatgcggcgactgttctataactttgataaaaattacaaggactggcagtctgctgtagagtgtatcgcagtgttgggtaagactttgaacaagcttgttctcaggctttgataagtagtgctgtttgccagctgtatattatccctaaaaataagtaataaggtatatatggtacatattttgacatgcatatacatatttgcatcctgactaggctgcccacagcaatttaagttacttgaaactcgcttttatcttagtagccctttggcctttcttcagtttttttttttttttttttttttttgagacatggtcttgctctgttgcccaggctagaatatggtgacacaaccatggctactgcagcctcgacctcccaggcttaagtgatctttccacctcagcctcccaagtagctgagattacagatatgcaccaccatgcatggctaatatttaaatgtttgtagagagatggggtctcactgtgttgccaggactggtcttgaactcctgggctcaagtgatcctcctgcctcggcttcccaaagtgctgaggttacaggcatgaccc

SEQ ID NO: 380 - DNA, 1266 bp, Homo sapiens
gttttgttttttgagacagagtctctctgtcgcccaggctggagtgcattggtgcgatcttggctcattgcaacctctgcctcccaggttcaagtgattctcctgcctcagcctcctgcgtagctgggattacaggcatatgccacgtgtattaggcactgctaatttctgtatttttagtagagacgaggtttcaccatgttggtcaggctggtcctgaactgctgacctcgtgaactctgcccgcctaggcctcctgaagtgctgggattacaggcgtgagccaccgtgcctggcctctgctctatcttttagctttcccttggcacttctatggtccagatgttagagggtaagtattttgatgggggagatcgttggactgtaattgaaagttatgtcttataatgaaatgtgttatataaagaagacctataaaacacttaggctgataaaacccccaaacgatgaagcctcacttttaccctctcttttaacagatgttttactgtgcctggctaactatagtcgagggggtgatggtcctatgtgtcgcccagtaattctgttgccggaagataccccccccttcttagagcttaaaggatcacgccatccttgcattacgaagactttttttggagatgattttattcctaatgacattctaataggctgtgaggaagaggagcaggaaaatggcaaagcctattgtgtgcttgttactggaccaaatatggggggcaagtctacgcttatgagacaggtaactgattcttaaagttttgttatcagaaagtcatttgtgacattaggaataacatacttaggtgatcattttccaaacacagttacataaaagtcagccagtgacttaataggaagcaaagggaaattactccctgtgttataaaattgagaattatatttagctgaaacatcgatgcttaatgttaaggggaatatatgttaaaaaggggaaggaggtcagtcattcaggtcatgaggccctttgacttgaattcatttcctcagaaggtaggtatattcatagtgaacaaaaatacaaaggctgtatgaaaagatgaaaatgttacaggtttatccttaaattagactcatttgcagaaatgcaaatgaggtaagaaagcaaatatagttcatgacctctagcaactgttgaaaactgctctttagggatgacatgctggcccttttttttttgttgttgccaaggctgaagtgcagtggcaccatcacagctca

SEQ ID NO: 381 - DNA, 1118 bp, Homo sapiens
ctgctctcctgcattatagtatacttctgttcacctagtttgctagagagaggcagtatagtgtgtatagtgatttccaaactttttctttaaatcagaatcacctgaaagaatgtgacaacgtgtaaaaaaaaaaaaaaaggtgcagagattccatcctgacatggattcacttgattggaattgattctaggcatctcagtagttttaaagagctcctaggtgattctattctggccagcgttgagaatcactagggtagtgggttggtaagcaggctctgatgttttaaaggccaggtgaggccctatgcctcttgtctctcttagcctcaactttctccatgttagcaaatggatttcagaacagaaccaacgtacatgtgattgtgaaagttgttttagagtgcctagctcttacgtaagggttcataagaaagacaaaagtttatgaaactgttactaccagtcataaaagaccttttcctccctcattcacaggctggcttattagctgtaatggcccagatgggttgttacgtccctgctgaagtgtgcaggctcacaccaattgatagagtgtttactagacttggtgcctcagacagaataatgtcaggtgagttttttgtttcccacttaagttctcattcagtcatttagatgtgataaaagatatttgcttcttgtatatgagccttttaaatctaatatttgatttttctggtgttactttaaaaacatcactttttaagaactgcatagtctctctctcttttttttttttttgagatggagtttccctcttgttgcccaagctggagtgcaatggcacgatcttggctcactgcaacctctgcttccaggttcaagtgattctcctgcctcagcctctcgagtagctgggattacaggcgcatgccatcacgcccagctaattttttgtatttttagtagaagcggggtttcaccatgttaggctggtctcttaactcctgacctcaggtgatctgcttgcctcggcctcccaaagtgctgggattacaggcgtgagccaccgtgcccggccaataattgcatagtctcttaatgagatttaatcttttataccaatatgtg

SEQ ID NO: 382 - DNA, 1090 bp, Homo sapiens
aatatttgatttttctggtgttactttaaaaacatcactttttaagaactgcatagtctctctctcttttttttttttttgagatggagtttccctcttgttgcccaagctggagtgcaatggcacgatcttggctcactgcaacctctgcttccaggttcaagtgattctcctgcctcagcctctcgagtagctgggattacaggcgcatgccatcacgcccagctaattttttgtatttttagtagaagcggggtttcaccatgttaggctggtctcttaactcctgacctcaggtgatctgcttgcctcggcctcccaaagtgctgggattacaggcgtgagccaccgtgcccggccaataattgcatagtctcttaatgagatttaatcttttataccaatatgtgtagctcatgatagctatataacctagaagatgaatttatgtaatatgatttgcaaaatgagtattcatttgtgatttttttttttttaaggtgaaagtacattttttgttgaattaagtgaaactgccagcatactcatgcatgcaacagcacattctctggtgcttgtggatgaattaggtaagacattaaacttctcatttgaagactatctatcttaaaaacatttgtacaaataactatttttatagaagattatctgaagtacatttaaacaatatgaatgtttttagagcacgcactcaccattgtggcacagaccgatagttggagataaaaggtgatattgtgaaaggtttttgattacccattaattattaggccttacactgtttagttgtaataaaacatttgttatactacggggatgagaacactaataggaggactcaggaagtttatgaccttgagcgatactgtattttctttaaaagaaacctcactccccatgggctgctaagcagactcgtgtagctaaacaaggcctatttatagaatgcttttagacgtggatgtactaaccgatgttgcttttctgtcctagcatttttgttttaattccttttttgttttaattcctttgagttacttccttatgcatattttactttaacaggaag

SEQ ID NO: 383 - DNA, 1155 bp, Homo sapiens
ttaggtaagacattaaacttctcatttgaagactatctatcttaaaaacatttgtacaaataactatttttatagaagattatctgaagtacatttaaacaatatgaatgtttttagagcacgcactcaccattgtggcacagaccgatagttggagataaaaggtgatattgtgaaaggtttttgattacccattaattattaggccttacactgtttagttgtaataaaacatttgttatactacggggatgagaacactaataggaggactcaggaagtttatgaccttgagcgatactgtattttctttaaaagaaacctcactccccatgggctgctaagcagactcgtgtagctaaacaaggcctatttatagaatgcttttagacgtggatgtactaaccgatgttgcttttctgtcctagcatttttgttttaattccttttttgttttaattcctttgagttacttccttatgcatattttactttaacaggaagaggtactgcaacatttgatgggacggcaatagcaaatgcagttgttaaagaacttgctgagactataaaatgtcgtacattattttcaactcactaccattcattagtagaagattattctcaaaatgttgctgtgcgcctaggacatatggtatgtgcaaattgtttttttccacaaattcggttttttgagagggcacttctcttgctagcacatgtatcgctaatatttttctttcttaaggcatgcatggtagaaaatgaatgtgaagaccccagccaggagactattacgttcctctataaattcattaagggagcttgtcctaaaagctatggctttaatgcagcaaggcttgctaatctcccagaggaagttattcaaaagggacatagaaaagcaagagaatttgagaagatgaatcagtcactacgattatttcggtaactaactaactataatggaattataactaactgaccttaagtttcaaagaaacagtaaaaggggaagggatgatgcactatgaaaaaacaaaaaaacttttttttttttttttttaattttaagggaagtttgcctggctagtgaaaggtcaactgtagatgctgaagctgtccataaattgctgactttgattaaggaattat

SEQ ID NO: 384 - DNA, 1200 bp, Homo sapiens
gggatgagaacactaataggaggactcaggaagtttatgaccttgagcgatactgtattttctttaaaagaaacctcactccccatgggctgctaagcagactcgtgtagctaaacaaggcctatttatagaatgcttttagacgtggatgtactaaccgatgttgcttttctgtcctagcatttttgttttaattccttttttgttttaattcctttgagttacttccttatgcatattttactttaacaggaagaggtactgcaacatttgatgggacggcaatagcaaatgcagttgttaaagaacttgctgagactataaaatgtcgtacattattttcaactcactaccattcattagtagaagattattctcaaaatgttgctgtgcgcctaggacatatggtatgtgcaaattgtttttttccacaaattcggttttttgagagggcacttctcttgctagcacatgtatcgctaatatttttctttcttaaggcatgcatggtagaaaatgaatgtgaagaccccagccaggagactattacgttcctctataaattcattaagggagcttgtcctaaaagctatggctttaatgcagcaaggcttgctaatctcccagaggaagttattcaaaagggacatagaaaagcaagagaatttgagaagatgaatcagtcactacgattatttcggtaactaactaactataatggaattataactaactgaccttaagtttcaaagaaacagtaaaaggggaagggatgatgcactatgaaaaaacaaaaaaacttttttttttttttttttaattttaagggaagtttgcctggctagtgaaaggtcaactgtagatgctgaagctgtccataaattgctgactttgattaaggaattatagactgactacattggaagctttgagttgacttctgacaaaggtggtaaattcagacaacattatgatctaataaactttattttttaaaaatgaccatttttccattttctttctaggaaattaaacccttttaattcttatctaccttctacataatggttattgaatactccacaatatattaagtctagatgttatggtacatgcatacactttcaggctgttttatacccactgtcaccaatacacataaatgggggaggaaaagctatgaaactgtatagggctgta

SEQ ID NO: 385 - DNA, 1175 bp, Homo sapiens
gtcgtacattattttcaactcactaccattcattagtagaagattattctcaaaatgttgctgtgcgcctaggacatatggtatgtgcaaattgtttttttccacaaattcggttttttgagagggcacttctcttgctagcacatgtatcgctaatatttttctttcttaaggcatgcatggtagaaaatgaatgtgaagaccccagccaggagactattacgttcctctataaattcattaagggagcttgtcctaaaagctatggctttaatgcagcaaggcttgctaatctcccagaggaagttattcaaaagggacatagaaaagcaagagaatttgagaagatgaatcagtcactacgattatttcggtaactaactaactataatggaattataactaactgaccttaagtttcaaagaaacagtaaaaggggaagggatgatgcactatgaaaaaacaaaaaaacttttttttttttttttttaattttaagggaagtttgcctggctagtgaaaggtcaactgtagatgctgaagctgtccataaattgctgactttgattaaggaattatagactgactacattggaagctttgagttgacttctgacaaaggtggtaaattcagacaacattatgatctaataaactttattttttaaaaatgaccatttttccattttctttctaggaaattaaacccttttaattcttatctaccttctacataatggttattgaatactccacaatatattaagtctagatgttatggtacatgcatacactttcaggctgttttatacccactgtcaccaatacacataaatgggggaggaaaagctatgaaactgtatagggctgtatatatacttgtctcagcttaatgcaggaaattggtttaatttccagcagttttgtctaaactgttcaaaaaaaaactatgaacagagttcaaatacaggactgtttgttttgaagagactttctaaagtgtacttaaaacatagtagttttttacctttcacaaaactgagttacaagaatacttttgttttacagtgcatcccttcctaggaagtctcattaaaacactcactttttctaggggtgattttgaatgctgcacagggaagggaaggaaataatagtcttaacttttcttaaa

SEQ ID NO: 386 - DNA, 1500 bp, Homo sapiens
atgcatggtagaaaatgaatgtgaagaccccagccaggagactattacgttcctctataaattcattaagggagcttgtcctaaaagctatggctttaatgcagcaaggcttgctaatctcccagaggaagttattcaaaagggacatagaaaagcaagagaatttgagaagatgaatcagtcactacgattatttcggtaactaactaactataatggaattataactaactgaccttaagtttcaaagaaacagtaaaaggggaagggatgatgcactatgaaaaaacaaaaaaacttttttttttttttttttaattttaagggaagtttgcctggctagtgaaaggtcaactgtagatgctgaagctgtccataaattgctgactttgattaaggaattatagactgactacattggaagctttgagttgacttctgacaaaggtggtaaattcagacaacattatgatctaataaactttattttttaaaaatgaccatttttccattttctttctaggaaattaaacccttttaattcttatctaccttctacataatggttattgaatactccacaatatattaagtctagatgttatggtacatgcatacactttcaggctgttttatacccactgtcaccaatacacataaatgggggaggaaaagctatgaaactgtatagggctgtatatatacttgtctcagcttaatgcaggaaattggtttaatttccagcagttttgtctaaactgttcaaaaaaaaactatgaacagagttcaaatacaggactgtttgttttgaagagactttctaaagtgtacttaaaacatagtagttttttacctttcacaaaactgagttacaagaatacttttgttttacagtgcatcccttcctaggaagtctcattaaaacactcactttttctaggggtgattttgaatgctgcacagggaagggaaggaaataatagtcttaacttttcttaaaggataccagaaacattgctggatataatttaagattagtgttttctctttcatagaaagaacgtacatactgggacatgagtacagttacagcaagtctaggtgtgctaacaaaacagggcacattcaagtacagtaagattttgcttgaaattaaaaacaaactacatgagattaaagcattaaaatcatatttctcaatctgaatacatgttaaaaaaaaaaaatcaaaaggaacgcagaagtgctagctcacatttttaccatattacaaaagcaattggtacccatgtccataaaggcagcaacaaagctgcttgtctattgaagattactactgcaaattggactgcattcaatgctagttgtaaaaacaccagcttttcagaagttggtatctgtacaaaattgcagcttattttcttcacttctgtcccttcaagtctttacacagtaatgctaaaacacccagctttgagatcctgagtcaatatattgcca

SEQ ID NO: 387 - DNA, 1936 bp, Homo sapiens
cagccggagccgcggtgtacaacggaacttgtagtctcctcgtggctagttcaggcggaaggagcagtcctctgaagcttgaggagcctctagaactatgagcccgaggccttcccctctcccagagcgcagaggctttgaaggctacctctgggaagccgctcaccgtcggaagctgcgggagctgaaactgcgccatcgtcactgtcggcggccatgacaccgctcgtctcccgcctgagtcgtctgtgggccatcatgaggaagccacgagcagccgtgggaagtggtcacaggaagcaggcagccagccaggaagggaggcagaagcatgctaagaacaacagtcaggccaagccttctgcctgtgatgggatgattgctgagtgtcctggggccccagcaggcctggccaggcagccggaagaggtggtattgcaggcctctgtctcctcataccatctattcagagacgtagctgaagtcacagccttccgagggagcctgctaagctggtacgaccaagagaaacgggacctaccatggagaagacgggcagaagatgagatggacctggacaggcgggcatatgctgtgtgggtctcagaggtcatgctgcagcagacccaggttgccactgtgatcaactactataccggatggatgcagaagtggcctacactgcaggacctggccagtgcttccctggaggaggtgaatcaactctgggctggcctgggctactattctcgtggccggcggctgcaggagggagctcggaaggtggtagaggagctagggggccacatgccacgtacagcagagaccctgcagcagctcctgcctggcgtggggcgctacacagctggggccattgcctctatcgcctttggccaggcaaccggtgtggtggatggcaacgtagcacgggtgctgtgccgtgtccgagccattggtgctgatcccagcagcacccttgtttcccagcagctctggggtctagcccagcagctggtggacccagcccggccaggagatttcaaccaagcagccatggagctaggggccacagtgtgtaccccacagcgcccactgtgcagccagtgccctgtggagagcctgtgccgggcacgccagagagtggagcaggaacagctcttagcctcagggagcctgtcgggcagtcctgacgtggaggagtgtgctcccaacactggacagtgccacctgtgcctgcctccctcggagccctgggaccagaccctgggagtggtcaacttccccagaaaggccagccgcaagccccccagggaggagagctctgccacctgtgttctggaacagcctggggcccttggggcccaaattctgctggtgcagaggcccaactcaggtctgctggcaggactgtgggagttcccgtccgtgacctgggagccctcagagcagcttcagcgcaaggccctgctgcaggaactacagcgttgggctgggcccctcccagccacgcacctccggcaccttggggaggttgtccacaccttctctcacatcaagctgacatatcaagtatatgggctggccttggaagggcagaccccagtgaccaccgtaccaccaggtgctcgctggctgacgcaggaggaatttcacaccgcagctgtttccaccgccatgaaaaaggttttccgtgtgtatcagggccaacagccagggacctgtatgggttccaaaaggtcccaggtgtcctctccgtgcagtcggaaaaagccccgcatgggccagcaagtcctggataatttctttcggtctcacatctccactgatgcacacagcctcaacagtgcagcccagtgacacctctgaaagcccccattccctgagaatcctgttgttagtaaagtgcttatttttgtagttaaaaaaaaaaaaaaaa

SEQ ID NO: 388 - DNA, 1905 bp, Homo sapiens
cagccggagccgcggtgtacaacggaacttgtagtctcctcgtggctagttcaggcggaaggagcagtcctctgaagcttgaggagcctctagaactatgagcccgaggccttcccctctcccagagcgcagaggctttgaaggctacctctgggaagccgctcaccgtcggaagctgcgggagctgaaactgcgccatcgtcactgtcggcggccatgacaccgctcgtctcccgcctgagtcgtctgtgggccatcatgaggaagccacgagcagccgtgggaagtggtcacaggaagcaggcagccagccaggaagggaggcagaagcatgctaagaacaacagtcaggccaagccttctgcctgtgatggcctggccaggcagccggaagaggtggtattgcaggcctctgtctcctcataccatctattcagagacgtagctgaagtcacagccttccgagggagcctgctaagctggtacgaccaagagaaacgggacctaccatggagaagacgggcagaagatgagatggacctggacaggcgggcatatgctgtgtgggtctcagaggtcatgctgcagcagacccaggttgccactgtgatcaactactataccggatggatgcagaagtggcctacactgcaggacctggccagtgcttccctggaggaggtgaatcaactctgggctggcctgggctactattctcgtggccggcggctgcaggagggagctcggaaggtggtagaggagctagggggccacatgccacgtacagcagagaccctgcagcagctcctgcctggcgtggggcgctacacagctggggccattgcctctatcgcctttggccaggcaaccggtgtggtggatggcaacgtagcacgggtgctgtgccgtgtccgagccattggtgctgatcccagcagcacccttgtttcccagcagctctggggtctagcccagcagctggtggacccagcccggccaggagatttcaaccaagcagccatggagctaggggccacagtgtgtaccccacagcgcccactgtgcagccagtgccctgtggagagcctgtgccgggcacgccagagagtggagcaggaacagctcttagcctcagggagcctgtcgggcagtcctgacgtggaggagtgtgctcccaacactggacagtgccacctgtgcctgcctccctcggagccctgggaccagaccctgggagtggtcaacttccccagaaaggccagccgcaagccccccagggaggagagctctgccacctgtgttctggaacagcctggggcccttggggcccaaattctgctggtgcagaggcccaactcaggtctgctggcaggactgtgggagttcccgtccgtgacctgggagccctcagagcagcttcagcgcaaggccctgctgcaggaactacagcgttgggctgggcccctcccagccacgcacctccggcaccttggggaggttgtccacaccttctctcacatcaagctgacatatcaagtatatgggctggccttggaagggcagaccccagtgaccaccgtaccaccaggtgctcgctggctgacgcaggaggaatttcacaccgcagctgtttccaccgccatgaaaaaggttttccgtgtgtatcagggccaacagccagggacctgtatgggttccaaaaggtcccaggtgtcctctccgtgcagtcggaaaaagccccgcatgggccagcaagtcctggataatttctttcggtctcacatctccactgatgcacacagcctcaacagtgcagcccagtgacacctctgaaagcccccattccctgagaatcctgttgttagtaaagtgcttatttttgtagttaaaaaaaaaaaaaaaaaa

SEQ ID NO: 389 - DNA, 1945 bp, Homo sapiens
cagccggagccgcggtgtacaacggaacttgtagtctcctcgtggctagttcaggcggaaggagcagtcctctgaagcttgaggagcctctagaactatgagcccgaggccttcccctctcccagagcgcagaggctttgaaggctacctctgggaagccgctcaccgtcggaagctgcgggagctgaaactgcgccatcgtcactgtcggcggccatgacaccgctcgtctcccgcctgagtcgtctgtgggccatcatgaggaagccacgagcagccgtgggaagtggtcacaggaagcaggcagccagccaggaagggaggcagaagcatgctaagaacaacagtcaggccaagccttctgcctgtgatgcctgtgcagggatgattgctgagtgtcctggggccccagcaggcctggccaggcagccggaagaggtggtattgcaggcctctgtctcctcataccatctattcagagacgtagctgaagtcacagccttccgagggagcctgctaagctggtacgaccaagagaaacgggacctaccatggagaagacgggcagaagatgagatggacctggacaggcgggcatatgctgtgtgggtctcagaggtcatgctgcagcagacccaggttgccactgtgatcaactactataccggatggatgcagaagtggcctacactgcaggacctggccagtgcttccctggaggaggtgaatcaactctgggctggcctgggctactattctcgtggccggcggctgcaggagggagctcggaaggtggtagaggagctagggggccacatgccacgtacagcagagaccctgcagcagctcctgcctggcgtggggcgctacacagctggggccattgcctctatcgcctttggccaggcaaccggtgtggtggatggcaacgtagcacgggtgctgtgccgtgtccgagccattggtgctgatcccagcagcacccttgtttcccagcagctctggggtctagcccagcagctggtggacccagcccggccaggagatttcaaccaagcagccatggagctaggggccacagtgtgtaccccacagcgcccactgtgcagccagtgccctgtggagagcctgtgccgggcacgccagagagtggagcaggaacagctcttagcctcagggagcctgtcgggcagtcctgacgtggaggagtgtgctcccaacactggacagtgccacctgtgcctgcctccctcggagccctgggaccagaccctgggagtggtcaacttccccagaaaggccagccgcaagccccccagggaggagagctctgccacctgtgttctggaacagcctggggcccttggggcccaaattctgctggtgcagaggcccaactcaggtctgctggcaggactgtgggagttcccgtccgtgacctgggagccctcagagcagcttcagcgcaaggccctgctgcaggaactacagcgttgggctgggcccctcccagccacgcacctccggcaccttggggaggttgtccacaccttctctcacatcaagctgacatatcaagtatatgggctggccttggaagggcagaccccagtgaccaccgtaccaccaggtgctcgctggctgacgcaggaggaatttcacaccgcagctgtttccaccgccatgaaaaaggttttccgtgtgtatcagggccaacagccagggacctgtatgggttccaaaaggtcccaggtgtcctctccgtgcagtcggaaaaagccccgcatgggccagcaagtcctggataatttctttcggtctcacatctccactgatgcacacagcctcaacagtgcagcccagtgacacctctgaaagcccccattccctgagaatcctgttgttagtaaagtgcttatttttgtagttaaaaaaaaaaaaaaaa

SEQ ID NO: 390 - DNA, 1710 bp, Homo sapiens
tctcgcggcgggaacgcggggcctccgtgttctgctgtcttcatcagcgtgggccgcgggccatcatgaggaagccacgagcagccgtgggaagtggtcacaggaagcaggcagccagccaggaagggaggcagaagcatgctaagaacaacagtcaggccaagccttctgcctgtgatggcctggccaggcagccggaagaggtggtattgcaggcctctgtctcctcataccatctattcagagacgtagctgaagtcacagccttccgagggagcctgctaagctggtacgaccaagagaaacgggacctaccatggagaagacgggcagaagatgagatggacctggacaggcgggcatatgctgtgtgggtctcagaggtcatgctgcagcagacccaggttgccactgtgatcaactactataccggatggatgcagaagtggcctacactgcaggacctggccagtgcttccctggaggaggtgaatcaactctgggctggcctgggctactattctcgtggccggcggctgcaggagggagctcggaaggtggtagaggagctagggggccacatgccacgtacagcagagaccctgcagcagctcctgcctggcgtggggcgctacacagctggggccattgcctctatcgcctttggccaggcaaccggtgtggtggatggcaacgtagcacgggtgctgtgccgtgtccgagccattggtgctgatcccagcagcacccttgtttcccagcagctctggggtctagcccagcagctggtggacccagcccggccaggagatttcaaccaagcagccatggagctaggggccacagtgtgtaccccacagcgcccactgtgcagccagtgccctgtggagagcctgtgccgggcacgccagagagtggagcaggaacagctcttagcctcagggagcctgtcgggcagtcctgacgtggaggagtgtgctcccaacactggacagtgccacctgtgcctgcctccctcggagccctgggaccagaccctgggagtggtcaacttccccagaaaggccagccgcaagccccccagggaggagagctctgccacctgtgttctggaacagcctggggcccttggggcccaaattctgctggtgcagaggcccaactcaggtctgctggcaggactgtgggagttcccgtccgtgacctgggagccctcagagcagcttcagcgcaaggccctgctgcaggaactacagcgttgggctgggcccctcccagccacgcacctccggcaccttggggaggttgtccacaccttctctcacatcaagctgacatatcaagtatatgggctggccttggaagggcagaccccagtgaccaccgtaccaccaggtgctcgctggctgacgcaggaggaatttcacaccgcagctgtttccaccgccatgaaaaaggttttccgtgtgtatcagggccaacagccagggacctgtatgggttccaaaaggtcccaggtgtcctctccgtgcagtcggaaaaagccccgcatgggccagcaagtcctggataatttctttcggtctcacatctccactgatgcacacagcctcaacagtgcagcccagtgacacctctgaaagcccccattccctgagaatcctgttgttagtaaagtgcttatttttgtagttaaaaaaaaaaaaaaaa

SEQ ID NO: 391 - DNA, 1794 bp, Homo sapiens
tcccgggtccggcgcggggaaggcagcctggcgcgcgctaattgcctattggcctgtgctgccggctcgcagcccgggtggacccgagccacgccccctggagtgcgccggaaagccgggcgcgctagagctcgcgggaggccatcatgaggaagccacgagcagccgtgggaagtggtcacaggaagcaggcagccagccaggaagggaggcagaagcatgctaagaacaacagtcaggccaagccttctgcctgtgatgcaggcctggccaggcagccggaagaggtggtattgcaggcctctgtctcctcataccatctattcagagacgtagctgaagtcacagccttccgagggagcctgctaagctggtacgaccaagagaaacgggacctaccatggagaagacgggcagaagatgagatggacctggacaggcgggcatatgctgtgtgggtctcagaggtcatgctgcagcagacccaggttgccactgtgatcaactactataccggatggatgcagaagtggcctacactgcaggacctggccagtgcttccctggaggaggtgaatcaactctgggctggcctgggctactattctcgtggccggcggctgcaggagggagctcggaaggtggtagaggagctagggggccacatgccacgtacagcagagaccctgcagcagctcctgcctggcgtggggcgctacacagctggggccattgcctctatcgcctttggccaggcaaccggtgtggtggatggcaacgtagcacgggtgctgtgccgtgtccgagccattggtgctgatcccagcagcacccttgtttcccagcagctctggggtctagcccagcagctggtggacccagcccggccaggagatttcaaccaagcagccatggagctaggggccacagtgtgtaccccacagcgcccactgtgcagccagtgccctgtggagagcctgtgccgggcacgccagagagtggagcaggaacagctcttagcctcagggagcctgtcgggcagtcctgacgtggaggagtgtgctcccaacactggacagtgccacctgtgcctgcctccctcggagccctgggaccagaccctgggagtggtcaacttccccagaaaggccagccgcaagccccccagggaggagagctctgccacctgtgttctggaacagcctggggcccttggggcccaaattctgctggtgcagaggcccaactcaggtctgctggcaggactgtgggagttcccgtccgtgacctgggagccctcagagcagcttcagcgcaaggccctgctgcaggaactacagcgttgggctgggcccctcccagccacgcacctccggcaccttggggaggttgtccacaccttctctcacatcaagctgacatatcaagtatatgggctggccttggaagggcagaccccagtgaccaccgtaccaccaggtgctcgctggctgacgcaggaggaatttcacaccgcagctgtttccaccgccatgaaaaaggttttccgtgtgtatcagggccaacagccagggacctgtatgggttccaaaaggtcccaggtgtcctctccgtgcagtcggaaaaagccccgcatgggccagcaagtcctggataatttctttcggtctcacatctccactgatgcacacagcctcaacagtgcagcccagtgacacctctgaaagcccccattccctgagaatcctgttgttagtaaagtgcttatttttgtagttaaaaaaaaaaaaaaaa

SEQ ID NO: 392 - DNA, 1791 bp, Homo sapiens
tcccgggtccggcgcggggaaggcagcctggcgcgcgctaattgcctattggcctgtgctgccggctcgcagcccgggtggacccgagccacgccccctggagtgcgccggaaagccgggcgcgctagagctcgcgggaggccatcatgaggaagccacgagcagccgtgggaagtggtcacaggaagcaggcagccagccaggaagggaggcagaagcatgctaagaacaacagtcaggccaagccttctgcctgtgatggcctggccaggcagccggaagaggtggtattgcaggcctctgtctcctcataccatctattcagagacgtagctgaagtcacagccttccgagggagcctgctaagctggtacgaccaagagaaacgggacctaccatggagaagacgggcagaagatgagatggacctggacaggcgggcatatgctgtgtgggtctcagaggtcatgctgcagcagacccaggttgccactgtgatcaactactataccggatggatgcagaagtggcctacactgcaggacctggccagtgcttccctggaggaggtgaatcaactctgggctggcctgggctactattctcgtggccggcggctgcaggagggagctcggaaggtggtagaggagctagggggccacatgccacgtacagcagagaccctgcagcagctcctgcctggcgtggggcgctacacagctggggccattgcctctatcgcctttggccaggcaaccggtgtggtggatggcaacgtagcacgggtgctgtgccgtgtccgagccattggtgctgatcccagcagcacccttgtttcccagcagctctggggtctagcccagcagctggtggacccagcccggccaggagatttcaaccaagcagccatggagctaggggccacagtgtgtaccccacagcgcccactgtgcagccagtgccctgtggagagcctgtgccgggcacgccagagagtggagcaggaacagctcttagcctcagggagcctgtcgggcagtcctgacgtggaggagtgtgctcccaacactggacagtgccacctgtgcctgcctccctcggagccctgggaccagaccctgggagtggtcaacttccccagaaaggccagccgcaagccccccagggaggagagctctgccacctgtgttctggaacagcctggggcccttggggcccaaattctgctggtgcagaggcccaactcaggtctgctggcaggactgtgggagttcccgtccgtgacctgggagccctcagagcagcttcagcgcaaggccctgctgcaggaactacagcgttgggctgggcccctcccagccacgcacctccggcaccttggggaggttgtccacaccttctctcacatcaagctgacatatcaagtatatgggctggccttggaagggcagaccccagtgaccaccgtaccaccaggtgctcgctggctgacgcaggaggaatttcacaccgcagctgtttccaccgccatgaaaaaggttttccgtgtgtatcagggccaacagccagggacctgtatgggttccaaaaggtcccaggtgtcctctccgtgcagtcggaaaaagccccgcatgggccagcaagtcctggataatttctttcggtctcacatctccactgatgcacacagcctcaacagtgcagcccagtgacacctctgaaagcccccattccctgagaatcctgttgttagtaaagtgcttatttttgtagttaaaaaaaaaaaaaaaa

SEQ ID NO: 393 - DNA, 1500 bp, Homo sapiens
tggggttgggtatgggggttgctgtggctaggagttagccttatgaaggacccaaaccacccaggtctgtgacccccccactccacagttgagggctggcactaaagagaaaagggcttatacttactggttcagcaaactcttcctgtccccaagcccactcagctcctgtgggtaggtaaagggagagttgtgacaggcctctagcaccagccccttcacaaccacctgccctccttgtttcccaactctcaccgtgtccacagccacgaaattagctgtctttatggctagcaggagggatggccacatctccttgaagttgttgctttgcacatccactacgggaacctggactactagctcctccccagatgttgtgcttttgctgacaccacctgggggttaggagggtgatggatgttcatgcttaaggaaagagcccaggggaacagacaccaagctaggccacggtgatggtggtaaggggggtagtttccattggtagcttttcccacaagcctttgtaacccacgtgttctacacacaggccttggagtggagaatgccctgaatttggggagaggaagcctgagtcttctactggcttgtatgagcctgggtaaattacttcccacctcgctttcacaatctgtagaggagaaagttggactagacgacctttgattcttttttcccatgtcctgcaggaaacattttgtagggcttgaggatctcagctcccttaatatcccacagggatccatactactgttctcatggtgccccagcgccacaagcaacagctcccagtaagccccagagcctggcagtgccccacaccagagctcccaatacgtcctaccttcctttggatcacaacgctcaatccactccactgaactgaatcacaactattactactaaccgttatgagctccagactacatctcccgccatgcctccatcagccccatgctcccaacgctccaggcttttgcagccggagccgcggtgtacaacggaacttgtagtctcctcgtggctagttcaggcggaaggagcagtcctctgaagcttgaggagcctctagaactatgagcccgaggccttcccctctcccagagcgcagaggctttgaaggctacctctgggaagccgctcaccgtcggaagctgcgggagctgaaactgcgccatcgtcactgtcggcggccatgacaccgctcgtctcccgcctgagtcgtctgtgggtacgctggacttgcggtccgtctcctggcgcggttcaggcagtcggggatggggcggggtctcgccgtcgggtcgccgatgggtcgaacttccgttcagacgtcccgggtccggcgcggggaaggcagcctggcgcgcgctaattgcctattggcctgtgctgccggctcgcagcccgggtggacccgagccacgccccctggagtgcgccggaaagccgggcgcgctagagctcgcgggaggtaat

SEQ ID NO: 394 - DNA, 1252 bp, Homo sapiens
attggtagcttttcccacaagcctttgtaacccacgtgttctacacacaggccttggagtggagaatgccctgaatttggggagaggaagcctgagtcttctactggcttgtatgagcctgggtaaattacttcccacctcgctttcacaatctgtagaggagaaagttggactagacgacctttgattcttttttcccatgtcctgcaggaaacattttgtagggcttgaggatctcagctcccttaatatcccacagggatccatactactgttctcatggtgccccagcgccacaagcaacagctcccagtaagccccagagcctggcagtgccccacaccagagctcccaatacgtcctaccttcctttggatcacaacgctcaatccactccactgaactgaatcacaactattactactaaccgttatgagctccagactacatctcccgccatgcctccatcagccccatgctcccaacgctccaggcttttgcagccggagccgcggtgtacaacggaacttgtagtctcctcgtggctagttcaggcggaaggagcagtcctctgaagcttgaggagcctctagaactatgagcccgaggccttcccctctcccagagcgcagaggctttgaaggctacctctgggaagccgctcaccgtcggaagctgcgggagctgaaactgcgccatcgtcactgtcggcggccatgacaccgctcgtctcccgcctgagtcgtctgtgggtacgctggacttgcggtccgtctcctggcgcggttcaggcagtcggggatggggcggggtctcgccgtcgggtcgccgatgggtcgaacttccgttcagacgtcccgggtccggcgcggggaaggcagcctggcgcgcgctaattgcctattggcctgtgctgccggctcgcagcccgggtggacccgagccacgccccctggagtgcgccggaaagccgggcgcgctagagctcgcgggaggtaatctttctctcctgctctcgcggcgggaacgcggggcctccgtgttctgctgtcttcatcagcgtgggccgcgggtagcgggtagtggggtggctgggtttgggctttccagagaaggtgacgctgcctgagctgagcttaaagcacgcccaggagttagactaggagagggtcgtgtgggggaaagaagggcgttctgggcatcggtaaattcccagagaggatggagagctcagtgatctccagaaagtgaa

SEQ ID NO: 395 - DNA, 1121 bp, Homo sapiens
tctcagacagatcttttgtccctctgatccttggtttcttctaggataaaatgaaggttttggacttaatgactactacaggctgtttcagtgtaaccatgctacatctctaagaggcagagaaaccgcctacccccattctcccagacacacctaaacaacccctatccacacacacagtcacagtaagcatcagagatacacaaatgctcccaaacaggaggctttcatccttgacccatcccagccctggcctcacagtctttgcatgtctccagggctgtaacgccggcccccttgaggccacttgctcagctatactagttgtatctcagtgctgcagccagccaagagtaaacccgtgagcatcttgagagtgcttgagagaagctggaccccatgtgaatggtggatgagagggagatagctatcacccttggaaggcctcaaaatttggcctcattgtgactgactgctttggctgggtctttttgtttcaggccatcatgaggaagccacgagcagccgtgggaagtggtcacaggaagcaggcagccagccaggaagggaggcagaagcatgctaagaacaacagtcaggccaagccttctgcctgtgatggtaaggaactaggttgtggcccaaggctcattggccatgaaaggcagattcaggctgggaagggattgtgatacgtatcaagacattaagagacttactaagggccaggtgcggtggctcacacctgtaatcccagcactttgggaggccgaggcaggtggatcccttgagcccaggagtttgagaccagcttgggtaacatggcgaaatcccctctctatgctcgcgtggtggtgagcgtctgtagtcccagctactcgggaagctgaggtgacaggatcgcttgagcctggaaggcagaagttgcactgagtcaagataatgcaactgcatttcagtctgggcaacagagccagactcttgtctcaaaacaaaagagactcactgagggtgtaattctgactgtattgctgtgtgacattgggacaattgctctgaatggctgctttcttaccagtaaaatggagcagtagttcagcatttcctccctcatgtggctt

SEQ ID NO: 396 - DNA, 1191 bp, Homo sapiens
gcctggaaggcagaagttgcactgagtcaagataatgcaactgcatttcagtctgggcaacagagccagactcttgtctcaaaacaaaagagactcactgagggtgtaattctgactgtattgctgtgtgacattgggacaattgctctgaatggctgctttcttaccagtaaaatggagcagtagttcagcatttcctccctcatgtggctttcatgggaccaaatgagtttatgagcctgaaagtgttttgtgaataggaaggtcctgcaccagtatacattctagctggctaaaactattaggttttcattatggctcagagacaagccagtagtaccaccctgagaaaattaaggccagaaacttagccacagctacacacaattacataactctggtctgactccagctccaaagcttaagggggttagttgggggaagccctaagtgggagcatactgccacaggctgctgtgtcccaagaccctgatgcacagcctgtgcagggatgattgctgagtgtcctggggccccagcaggcctggccaggcagccggaagaggtggtattgcaggcctctgtctcctcataccatctattcagagacgtagctgaagtcacagccttccgagggagcctgctaagctggtacgaccaagagaaacgggacctaccatggagaagacgggtaggcaggcgaggagcagggacagtgggtgggaggcaggcacccagccccctccaccctaactcctcatctggggttgcattgacaggcagaagatgagatggacctggacaggcgggcatatgctggtcagtacatctcctgagagcagggccactttgcctcgaggcccttgggtctgggggctgtgggccaggtaggggcaggtcagcagtgtcctcatgccaacccctttcccccagtgtgggtctcagaggtcatgctgcagcagacccaggttgccactgtgatcaactactataccggatggatgcaggtgactccaggggaggaagggaagggtcatgggtcagaccccagatgagagcctctactttggggtgggtgtagagaaggcttcctctaccaccttcacccttgaccttgtctctttctgcctgcctgtggctatagaagtggcctacactgcaggacctggccagtgcttccctggaggtgag

SEQ ID NO: 397 - DNA, 1040 bp, Homo sapiens
acattctagctggctaaaactattaggttttcattatggctcagagacaagccagtagtaccaccctgagaaaattaaggccagaaacttagccacagctacacacaattacataactctggtctgactccagctccaaagcttaagggggttagttgggggaagccctaagtgggagcatactgccacaggctgctgtgtcccaagaccctgatgcacagcctgtgcagggatgattgctgagtgtcctggggccccagcaggcctggccaggcagccggaagaggtggtattgcaggcctctgtctcctcataccatctattcagagacgtagctgaagtcacagccttccgagggagcctgctaagctggtacgaccaagagaaacgggacctaccatggagaagacgggtaggcaggcgaggagcagggacagtgggtgggaggcaggcacccagccccctccaccctaactcctcatctggggttgcattgacaggcagaagatgagatggacctggacaggcgggcatatgctggtcagtacatctcctgagagcagggccactttgcctcgaggcccttgggtctgggggctgtgggccaggtaggggcaggtcagcagtgtcctcatgccaacccctttcccccagtgtgggtctcagaggtcatgctgcagcagacccaggttgccactgtgatcaactactataccggatggatgcaggtgactccaggggaggaagggaagggtcatgggtcagaccccagatgagagcctctactttggggtgggtgtagagaaggcttcctctaccaccttcacccttgaccttgtctctttctgcctgcctgtggctatagaagtggcctacactgcaggacctggccagtgcttccctggaggtgagagccaccctagggtaggggaaataggaacaatagagggactgacgggtgatctctttgacctctgatcctacccacaggaggtgaatcaactctgggctggcctgggctactattctcgtggccggcg

SEQ ID NO: 398 - DNA, 1074 bp, Homo sapiens
gttgggggaagccctaagtgggagcatactgccacaggctgctgtgtcccaagaccctgatgcacagcctgtgcagggatgattgctgagtgtcctggggccccagcaggcctggccaggcagccggaagaggtggtattgcaggcctctgtctcctcataccatctattcagagacgtagctgaagtcacagccttccgagggagcctgctaagctggtacgaccaagagaaacgggacctaccatggagaagacgggtaggcaggcgaggagcagggacagtgggtgggaggcaggcacccagccccctccaccctaactcctcatctggggttgcattgacaggcagaagatgagatggacctggacaggcgggcatatgctggtcagtacatctcctgagagcagggccactttgcctcgaggcccttgggtctgggggctgtgggccaggtaggggcaggtcagcagtgtcctcatgccaacccctttcccccagtgtgggtctcagaggtcatgctgcagcagacccaggttgccactgtgatcaactactataccggatggatgcaggtgactccaggggaggaagggaagggtcatgggtcagaccccagatgagagcctctactttggggtgggtgtagagaaggcttcctctaccaccttcacccttgaccttgtctctttctgcctgcctgtggctatagaagtggcctacactgcaggacctggccagtgcttccctggaggtgagagccaccctagggtaggggaaataggaacaatagagggactgacgggtgatctctttgacctctgatcctacccacaggaggtgaatcaactctgggctggcctgggctactattctcgtggccggcggctgcaggagggagctcggaaggtaaggggatggcaggagggtaggaacccaggagtcttgggtgtcttataatcttgagtcttgcactccaatcaggtggtagaggagctagggggccacatgccacgtacagcagagaccctgcagcagctcctgcctggcgtggggcgctacacagctggggcca

SEQ ID NO: 399 - DNA, 1042 bp, Homo sapiens
taagctggtacgaccaagagaaacgggacctaccatggagaagacgggtaggcaggcgaggagcagggacagtgggtgggaggcaggcacccagccccctccaccctaactcctcatctggggttgcattgacaggcagaagatgagatggacctggacaggcgggcatatgctggtcagtacatctcctgagagcagggccactttgcctcgaggcccttgggtctgggggctgtgggccaggtaggggcaggtcagcagtgtcctcatgccaacccctttcccccagtgtgggtctcagaggtcatgctgcagcagacccaggttgccactgtgatcaactactataccggatggatgcaggtgactccaggggaggaagggaagggtcatgggtcagaccccagatgagagcctctactttggggtgggtgtagagaaggcttcctctaccaccttcacccttgaccttgtctctttctgcctgcctgtggctatagaagtggcctacactgcaggacctggccagtgcttccctggaggtgagagccaccctagggtaggggaaataggaacaatagagggactgacgggtgatctctttgacctctgatcctacccacaggaggtgaatcaactctgggctggcctgggctactattctcgtggccggcggctgcaggagggagctcggaaggtaaggggatggcaggagggtaggaacccaggagtcttgggtgtcttataatcttgagtcttgcactccaatcaggtggtagaggagctagggggccacatgccacgtacagcagagaccctgcagcagctcctgcctggcgtggggcgctacacagctggggccattgcctctatcgcctttggccaggtgatctcacagcccacccccactttgtgcgtgcccagcctccttcctcccagcccaggctaactctttggcccctctgtgccaggcaaccggtgtggtggatggcaacgtagcacgggtgctgtgccgtgtccgagccattggtgctgatcccag

SEQ ID NO: 400 - DNA, 1072 bp, Homo sapiens
gcattgacaggcagaagatgagatggacctggacaggcgggcatatgctggtcagtacatctcctgagagcagggccactttgcctcgaggcccttgggtctgggggctgtgggccaggtaggggcaggtcagcagtgtcctcatgccaacccctttcccccagtgtgggtctcagaggtcatgctgcagcagacccaggttgccactgtgatcaactactataccggatggatgcaggtgactccaggggaggaagggaagggtcatgggtcagaccccagatgagagcctctactttggggtgggtgtagagaaggcttcctctaccaccttcacccttgaccttgtctctttctgcctgcctgtggctatagaagtggcctacactgcaggacctggccagtgcttccctggaggtgagagccaccctagggtaggggaaataggaacaatagagggactgacgggtgatctctttgacctctgatcctacccacaggaggtgaatcaactctgggctggcctgggctactattctcgtggccggcggctgcaggagggagctcggaaggtaaggggatggcaggagggtaggaacccaggagtcttgggtgtcttataatcttgagtcttgcactccaatcaggtggtagaggagctagggggccacatgccacgtacagcagagaccctgcagcagctcctgcctggcgtggggcgctacacagctggggccattgcctctatcgcctttggccaggtgatctcacagcccacccccactttgtgcgtgcccagcctccttcctcccagcccaggctaactctttggcccctctgtgccaggcaaccggtgtggtggatggcaacgtagcacgggtgctgtgccgtgtccgagccattggtgctgatcccagcagcacccttgtttcccagcagctctggtaggatgttggggtaacaagggtgcttcaggggtgtctgcaaaggagctctgcttcacagcagtgttcccttcttttaggggtctagcccagcagctggtggacccagcccggccaggagatttcaa

SEQ ID NO: 401 - DNA, 1114 bp, Homo sapiens
caacccctttcccccagtgtgggtctcagaggtcatgctgcagcagacccaggttgccactgtgatcaactactataccggatggatgcaggtgactccaggggaggaagggaagggtcatgggtcagaccccagatgagagcctctactttggggtgggtgtagagaaggcttcctctaccaccttcacccttgaccttgtctctttctgcctgcctgtggctatagaagtggcctacactgcaggacctggccagtgcttccctggaggtgagagccaccctagggtaggggaaataggaacaatagagggactgacgggtgatctctttgacctctgatcctacccacaggaggtgaatcaactctgggctggcctgggctactattctcgtggccggcggctgcaggagggagctcggaaggtaaggggatggcaggagggtaggaacccaggagtcttgggtgtcttataatcttgagtcttgcactccaatcaggtggtagaggagctagggggccacatgccacgtacagcagagaccctgcagcagctcctgcctggcgtggggcgctacacagctggggccattgcctctatcgcctttggccaggtgatctcacagcccacccccactttgtgcgtgcccagcctccttcctcccagcccaggctaactctttggcccctctgtgccaggcaaccggtgtggtggatggcaacgtagcacgggtgctgtgccgtgtccgagccattggtgctgatcccagcagcacccttgtttcccagcagctctggtaggatgttggggtaacaagggtgcttcaggggtgtctgcaaaggagctctgcttcacagcagtgttcccttcttttaggggtctagcccagcagctggtggacccagcccggccaggagatttcaaccaagcagccatggagctaggggccacagtgtgtaccccacagcgcccactgtgcagccagtgccctgtggagagcctgtgccgggcacgccagagagtaagcctactggggaaggggcagtgagaagtcctaaggagtgactctgccctatgacactcaaccctgtgcctctcaggtggagcaggaac

SEQ ID NO: 402 - DNA, 1098 bp, Homo sapiens
tgtctctttctgcctgcctgtggctatagaagtggcctacactgcaggacctggccagtgcttccctggaggtgagagccaccctagggtaggggaaataggaacaatagagggactgacgggtgatctctttgacctctgatcctacccacaggaggtgaatcaactctgggctggcctgggctactattctcgtggccggcggctgcaggagggagctcggaaggtaaggggatggcaggagggtaggaacccaggagtcttgggtgtcttataatcttgagtcttgcactccaatcaggtggtagaggagctagggggccacatgccacgtacagcagagaccctgcagcagctcctgcctggcgtggggcgctacacagctggggccattgcctctatcgcctttggccaggtgatctcacagcccacccccactttgtgcgtgcccagcctccttcctcccagcccaggctaactctttggcccctctgtgccaggcaaccggtgtggtggatggcaacgtagcacgggtgctgtgccgtgtccgagccattggtgctgatcccagcagcacccttgtttcccagcagctctggtaggatgttggggtaacaagggtgcttcaggggtgtctgcaaaggagctctgcttcacagcagtgttcccttcttttaggggtctagcccagcagctggtggacccagcccggccaggagatttcaaccaagcagccatggagctaggggccacagtgtgtaccccacagcgcccactgtgcagccagtgccctgtggagagcctgtgccgggcacgccagagagtaagcctactggggaaggggcagtgagaagtcctaaggagtgactctgccctatgacactcaaccctgtgcctctcaggtggagcaggaacagctcttagcctcagggagcctgtcgggcagtcctgacgtggaggagtgtggtgagcaccaaacctagcccccaccccaacccttcctggcccagtcagaagccccattccagttcttcctctaacctgagtaagattctgcagaacccggccaaagcccactctctaggttggcccctaaag

SEQ ID NO: 403 - DNA, 1145 bp, Homo sapiens
ctgggctactattctcgtggccggcggctgcaggagggagctcggaaggtaaggggatggcaggagggtaggaacccaggagtcttgggtgtcttataatcttgagtcttgcactccaatcaggtggtagaggagctagggggccacatgccacgtacagcagagaccctgcagcagctcctgcctggcgtggggcgctacacagctggggccattgcctctatcgcctttggccaggtgatctcacagcccacccccactttgtgcgtgcccagcctccttcctcccagcccaggctaactctttggcccctctgtgccaggcaaccggtgtggtggatggcaacgtagcacgggtgctgtgccgtgtccgagccattggtgctgatcccagcagcacccttgtttcccagcagctctggtaggatgttggggtaacaagggtgcttcaggggtgtctgcaaaggagctctgcttcacagcagtgttcccttcttttaggggtctagcccagcagctggtggacccagcccggccaggagatttcaaccaagcagccatggagctaggggccacagtgtgtaccccacagcgcccactgtgcagccagtgccctgtggagagcctgtgccgggcacgccagagagtaagcctactggggaaggggcagtgagaagtcctaaggagtgactctgccctatgacactcaaccctgtgcctctcaggtggagcaggaacagctcttagcctcagggagcctgtcgggcagtcctgacgtggaggagtgtggtgagcaccaaacctagcccccaccccaacccttcctggcccagtcagaagccccattccagttcttcctctaacctgagtaagattctgcagaacccggccaaagcccactctctaggttggcccctaaagccctcttggcttgagtagggttcggggatctccgttcccagctcccaacactggacagtgccacctgtgcctgcctccctcggagccctgggaccagaccctgggagtggtcaacttccccagaaaggccagccgcaagccccccagggaggagagctctgccacctgtgttctggaacagcctggggcccttggggcccaaattctgctggtgcagaggcccaa

SEQ ID NO: 404 - DNA, 1064 bp, Homo sapiens
cgcctttggccaggtgatctcacagcccacccccactttgtgcgtgcccagcctccttcctcccagcccaggctaactctttggcccctctgtgccaggcaaccggtgtggtggatggcaacgtagcacgggtgctgtgccgtgtccgagccattggtgctgatcccagcagcacccttgtttcccagcagctctggtaggatgttggggtaacaagggtgcttcaggggtgtctgcaaaggagctctgcttcacagcagtgttcccttcttttaggggtctagcccagcagctggtggacccagcccggccaggagatttcaaccaagcagccatggagctaggggccacagtgtgtaccccacagcgcccactgtgcagccagtgccctgtggagagcctgtgccgggcacgccagagagtaagcctactggggaaggggcagtgagaagtcctaaggagtgactctgccctatgacactcaaccctgtgcctctcaggtggagcaggaacagctcttagcctcagggagcctgtcgggcagtcctgacgtggaggagtgtggtgagcaccaaacctagcccccaccccaacccttcctggcccagtcagaagccccattccagttcttcctctaacctgagtaagattctgcagaacccggccaaagcccactctctaggttggcccctaaagccctcttggcttgagtagggttcggggatctccgttcccagctcccaacactggacagtgccacctgtgcctgcctccctcggagccctgggaccagaccctgggagtggtcaacttccccagaaaggccagccgcaagccccccagggaggagagctctgccacctgtgttctggaacagcctggggcccttggggcccaaattctgctggtgcagaggcccaactcaggtacctggatactgggcgtggagggcagtggcatgagtaacaagagagaatggagggaatcggcagctgaggcctgacccctgcctggctgccctccctctcaggtctgctggcaggactgtgggagttcccgtccgt

SEQ ID NO: 405 - DNA, 1189 bp, Homo sapiens
aaaggagctctgcttcacagcagtgttcccttcttttaggggtctagcccagcagctggtggacccagcccggccaggagatttcaaccaagcagccatggagctaggggccacagtgtgtaccccacagcgcccactgtgcagccagtgccctgtggagagcctgtgccgggcacgccagagagtaagcctactggggaaggggcagtgagaagtcctaaggagtgactctgccctatgacactcaaccctgtgcctctcaggtggagcaggaacagctcttagcctcagggagcctgtcgggcagtcctgacgtggaggagtgtggtgagcaccaaacctagcccccaccccaacccttcctggcccagtcagaagccccattccagttcttcctctaacctgagtaagattctgcagaacccggccaaagcccactctctaggttggcccctaaagccctcttggcttgagtagggttcggggatctccgttcccagctcccaacactggacagtgccacctgtgcctgcctccctcggagccctgggaccagaccctgggagtggtcaacttccccagaaaggccagccgcaagccccccagggaggagagctctgccacctgtgttctggaacagcctggggcccttggggcccaaattctgctggtgcagaggcccaactcaggtacctggatactgggcgtggagggcagtggcatgagtaacaagagagaatggagggaatcggcagctgaggcctgacccctgcctggctgccctccctctcaggtctgctggcaggactgtgggagttcccgtccgtgacctgggagccctcagagcagcttcagcgcaaggccctgctgcaggaactacagcgttgggctgggcccctcccagccacgcacctccggcaccttggggaggtaagtgagcagcggaatagccaaggatgttggcttttgaggctatatccacaggcctatttgaaccccttgacccttcctccaggttgtccacaccttctctcacatcaagctgacatatcaagtatatgggctggccttggaagggcagaccccagtgaccaccgtaccaccaggtgctcgctggctgacgcaggaggaatttcacaccgcagctgtttccaccgccatgaaaaaggcactacctttgttgtctttg

SEQ ID NO: 406 - DNA, 1137 bp, Homo sapiens
agcctgtcgggcagtcctgacgtggaggagtgtggtgagcaccaaacctagcccccaccccaacccttcctggcccagtcagaagccccattccagttcttcctctaacctgagtaagattctgcagaacccggccaaagcccactctctaggttggcccctaaagccctcttggcttgagtagggttcggggatctccgttcccagctcccaacactggacagtgccacctgtgcctgcctccctcggagccctgggaccagaccctgggagtggtcaacttccccagaaaggccagccgcaagccccccagggaggagagctctgccacctgtgttctggaacagcctggggcccttggggcccaaattctgctggtgcagaggcccaactcaggtacctggatactgggcgtggagggcagtggcatgagtaacaagagagaatggagggaatcggcagctgaggcctgacccctgcctggctgccctccctctcaggtctgctggcaggactgtgggagttcccgtccgtgacctgggagccctcagagcagcttcagcgcaaggccctgctgcaggaactacagcgttgggctgggcccctcccagccacgcacctccggcaccttggggaggtaagtgagcagcggaatagccaaggatgttggcttttgaggctatatccacaggcctatttgaaccccttgacccttcctccaggttgtccacaccttctctcacatcaagctgacatatcaagtatatgggctggccttggaagggcagaccccagtgaccaccgtaccaccaggtgctcgctggctgacgcaggaggaatttcacaccgcagctgtttccaccgccatgaaaaaggcactacctttgttgtctttgttgtacttccttgtgtttcctacatgttctacatgaatatattactgtgtaaacaggaaaaaaagcatttttttttgagacggagaatcgctctgttgcccaggctggagtgcaatggcgctatctcggttgactgcaacctccatctcccgggttcaagtgattctcctgcctcagcttcctgagtagctcggattacaggcgcccgccaccatgcctggctaatttttgtatttttagt

SEQ ID NO: 407 - DNA, 1153 bp, Homo sapiens
agtgccacctgtgcctgcctccctcggagccctgggaccagaccctgggagtggtcaacttccccagaaaggccagccgcaagccccccagggaggagagctctgccacctgtgttctggaacagcctggggcccttggggcccaaattctgctggtgcagaggcccaactcaggtacctggatactgggcgtggagggcagtggcatgagtaacaagagagaatggagggaatcggcagctgaggcctgacccctgcctggctgccctccctctcaggtctgctggcaggactgtgggagttcccgtccgtgacctgggagccctcagagcagcttcagcgcaaggccctgctgcaggaactacagcgttgggctgggcccctcccagccacgcacctccggcaccttggggaggtaagtgagcagcggaatagccaaggatgttggcttttgaggctatatccacaggcctatttgaaccccttgacccttcctccaggttgtccacaccttctctcacatcaagctgacatatcaagtatatgggctggccttggaagggcagaccccagtgaccaccgtaccaccaggtgctcgctggctgacgcaggaggaatttcacaccgcagctgtttccaccgccatgaaaaaggcactacctttgttgtctttgttgtacttccttgtgtttcctacatgttctacatgaatatattactgtgtaaacaggaaaaaaagcatttttttttgagacggagaatcgctctgttgcccaggctggagtgcaatggcgctatctcggttgactgcaacctccatctcccgggttcaagtgattctcctgcctcagcttcctgagtagctcggattacaggcgcccgccaccatgcctggctaatttttgtatttttagtagagatgaggtttcaccatgctggccaggctggtctccaactcttgacctcaagtgatccgcccgcctcagcctcccagaatgctgggattacaggtgtgagctaccacacccagccatgattttttgtatttttagagatggggtttcaccatgttggccaggctggtctcaaactcctggcctcaagtgatccacccgacttggcctcccaaaatgctgggattataggcgtgagc

SEQ ID NO: 408 - DNA, 1042 bp, Homo sapiens
gctggagtgcaatggcgctatctcggttgactgcaacctccatctcccgggttcaagtgattctcctgcctcagcttcctgagtagctcggattacaggcgcccgccaccatgcctggctaatttttgtatttttagtagagatgaggtttcaccatgctggccaggctggtctccaactcttgacctcaagtgatccgcccgcctcagcctcccagaatgctgggattacaggtgtgagctaccacacccagccatgattttttgtatttttagagatggggtttcaccatgttggccaggctggtctcaaactcctggcctcaagtgatccacccgacttggcctcccaaaatgctgggattataggcgtgagccaccatgcctggccaaaaaagcatattttaaacaaaagtactgggacatgaagttaagggcagaacaccggtttatctcttttgcaaaaagtgccagccctcacctccctgtcttcttgtctaggttttccgtgtgtatcagggccaacagccagggacctgtatggtaagtctcctaggcctctcccaaccgtgtctccccaggcctgagtccataggtttttagtcagttaactaacgaatgtctgggtgaacattctccactccaggcttcactggagggaggaatagttcttgacctggagaccttccattgtggggtgcagggtagagggaaaggaaaaaaatgatgaggactctccagtgtcacaggtgtgtgaaatgcctgtactgagttttgtgggatatgaattgtggagccatcagttcttttttttttttttttttttttttgagacagtctcactgtcacccaagctagagtgcagtggcccgatctcggctcactgcaatctcccacaactggattaaagcgattctcctgcctcagtctcccaagtagctgggattacaggtgcctgctaccacacccaactaatttttgtatttttagtagagacagggtttcaccatgttgactaggctggtctcgaactcctgacctca

SEQ ID NO: 409 - DNA, 1196 bp, Homo sapiens
gttctaattgggagacggatcaggaaaggctgtttggaggaagcagctggtaatcttcgtcctagaaatgaatccttttcttcaggtttgggaggggaatcaaccgtagcgatgttctttccagtcccaagagtagtgtgagcaaaggtggagcccagtgcaggctgcagtgctcaaggagctgtgagcagttggtttagctggaaaggtcagcagggcctgctgggtcagtcagggtgtgagccctaggctgctgactcattttaggtggaggagagaggagtcagatttgcatttttaggacaattcgattccctcaggcagccttttggagggttgattgatggggcagatacttgaggcaggatgaaagctctacagcattccaggctaagcctagctagatcagtagagtcggggaaagggagagaggacaaggagaggattctctgctccccctcccccaactacaaggcctccctccttccattttttcacagggttccaaaaggtcccaggtgtcctctccgtgcagtcggaaaaagccccgcatgggccagcaagtcctggataatttctttcggtctcacatctccactgatgcacacagcctcaacagtgcagcccagtgacacctctgaaagcccccattccctgagaatcctgttgttagtaaagtgcttatttttgtagttattttatgttgtatttttttgagatgggggtctcgctatgttgctcagactggtttcgaactcaggtgattctggcctcaagtgattctcccacttcagcctcctaaagtgcttggattacaggcatgagccaccacgcccgcccttttgtagctattttggacagccttccaccctctccctagccccctcaccccttatatctgagggagggacccagaaaagtggtgacgttctgcttggttctgactttctctggctgaactcccagccagccccgggcagatggggttggagtgggggtgttctgtccagactgatctgccctccaacccccaggagaaaggcaaggcagctacagggagaacctgccagtggctgacacacaacaccctctgtttacgtctcaggtcagctctaattggagtggtggcatcactctggagtaggtagttgggctcaactctcacccagcccctccccacctgagtggtcgctccc

SEQ ID NO: 410 - DNA, 1500 bp, Homo sapiens
ttagctggaaaggtcagcagggcctgctgggtcagtcagggtgtgagccctaggctgctgactcattttaggtggaggagagaggagtcagatttgcatttttaggacaattcgattccctcaggcagccttttggagggttgattgatggggcagatacttgaggcaggatgaaagctctacagcattccaggctaagcctagctagatcagtagagtcggggaaagggagagaggacaaggagaggattctctgctccccctcccccaactacaaggcctccctccttccattttttcacagggttccaaaaggtcccaggtgtcctctccgtgcagtcggaaaaagccccgcatgggccagcaagtcctggataatttctttcggtctcacatctccactgatgcacacagcctcaacagtgcagcccagtgacacctctgaaagcccccattccctgagaatcctgttgttagtaaagtgcttatttttgtagttattttatgttgtatttttttgagatgggggtctcgctatgttgctcagactggtttcgaactcaggtgattctggcctcaagtgattctcccacttcagcctcctaaagtgcttggattacaggcatgagccaccacgcccgcccttttgtagctattttggacagccttccaccctctccctagccccctcaccccttatatctgagggagggacccagaaaagtggtgacgttctgcttggttctgactttctctggctgaactcccagccagccccgggcagatggggttggagtgggggtgttctgtccagactgatctgccctccaacccccaggagaaaggcaaggcagctacagggagaacctgccagtggctgacacacaacaccctctgtttacgtctcaggtcagctctaattggagtggtggcatcactctggagtaggtagttgggctcaactctcacccagcccctccccacctgagtggtcgctccctagggggagaggaagcacaggagaagatttgttctgttttaaattcctacctcaaatacgaaataatttatttagggttatgttacatacggagtgaaacaatacagaaaagcaaagggctaataatgacaggatttgaggagtgggtgggaggaaatagaatcacagcgggacacagggaggactcgaaagtattggttatgttctatttcctagtgtgtaattcttttattgttctttgtatcttacatatttattatagactgtatataagaaatgttttagttttaaaaaatcccacctctttggagcccaatgagagacacagcttctggcaggcactgatgaaatggaagtcacacctgccccccggaggcaaagcctttcactagttgggcctcctgcagatgttcctcagttctgtgctggtctccccagagctgcaggacagctggctgcacccagccctgggcatccttaggcttcctggctcctggcag

SEQ ID NO: 411 - DNA, 4622 bp, Homo sapiens
gagcgcgcacgtcccggagcccatgccgaccgcaggcgccgtatccgcgctcgtctagcagccccggttacgcggttgcacgtcggccccagccctgaggagccggaccgatgtggaaactgctgcccgccgcgggcccggcaggaggagaaccatacagacttttgactggcgttgagtacgttgttggaaggaaaaactgtgccattctgattgaaaatgatcagtcgatcagccgaaatcatgctgtgttaactgctaacttttctgtaaccaacctgagtcaaacagatgaaatccctgtattgacattaaaagataattctaagtatggtacctttgttaatgaggaaaaaatgcagaatggcttttcccgaactttgaagtcgggggatggtattacttttggagtgtttggaagtaaattcagaatagagtatgagcctttggttgcatgctcttcttgtttagatgtctctgggaaaactgctttaaatcaagctatattgcaacttggaggatttactgtaaacaattggacagaagaatgcactcaccttgtcatggtatcagtgaaagttaccattaaaacaatatgtgcactcatttgtggacgtccaattgtaaagccagaatattttactgaattcctgaaagcagttgagtccaagaagcagcctccacaaattgaaagtttttacccacctcttgatgaaccatctattggaagtaaaaatgttgatctgtcaggacggcaggaaagaaaacaaatcttcaaagggaaaacatttatatttttgaatgccaaacagcataagaaattgagttccgcagttgtctttggaggtggggaagctaggttgataacagaagagaatgaagaagaacataatttctttttggctccgggaacgtgtgttgttgatacaggaataacaaactcacagaccttaattcctgactgtcagaagaaatggattcagtcaataatggatatgctccaaaggcaaggtcttagacctattcctgaagcagaaattggattggcggtgattttcatgactacaaagaattactgtgatcctcagggccatcccagtacaggattaaagacaacaactccaggaccaagcctttcacaaggcgtgtcagttgatgaaaaactaatgccaagcgccccagtgaacactacaacatacgtagctgacacagaatcagagcaagcagatacatgggatttgagtgaaaggccaaaagaaatcaaagtctccaaaatggaacaaaaattcagaatgctttcacaagatgcacccactgtaaaggagtcctgcaaaacaagctctaataataatagtatggtatcaaatactttggctaagatgagaatcccaaactatcagctttcaccaactaaattgccaagtataaataaaagtaaagatagggcttctcagcagcagcagaccaactccatcagaaactactttcagccgtctaccaaaaaaagggaaagggatgaagaaaatcaagaaatgtcttcatgcaaatcagcaagaatagaaacgtcttgttctcttttagaacaaacacaacctgctacaccctcattgtggaaaaataaggagcagcatctatctgagaatgagcctgtggacacaaactcagacaataacttatttacagatacagatttaaaatctattgtgaaaaattctgccagtaaatctcatgctgcagaaaagctaagatcaaataaaaaaagggaaatggatgatgtggccatagaagatgaagtattggaacagttattcaaggacacaaaaccagagttagaaattgatgtgaaagttcaaaaacaggaggaagatgtcaatgttagaaaaaggccaaggatggatatagaaacaaatgacactttcagtgatgaagcagtaccagaaagtagcaaaatatctcaagaaaatgaaattgggaagaaacgtgaactcaaggaagactcactatggtcagctaaagaaatatctaacaatgacaaacttcaggatgatagtgagatgcttccaaaaaagctgttattgactgaatttagatcactggtgattaaaaactctacttccagaaatccatctggcataaatgatgattatggtcaactaaaaaatttcaagaaattcaaaaaggtcacatatcctggagcaggaaaacttccacacatcattggaggatcagatctaatagctcatcatgctcgaaagaatacagaactagaagagtggctaaggcaggaaatggaggtacaaaatcaacatgcaaaagaagagtctcttgctgatgatctttttagatacaatccttatttaaaaaggagaagataactgaggattttaaaaagaagccatggaaaaacttcctagtaagcatctacttcaggccaacaaggttatatgaatatatagtgtatagaagcgatttaagttacaatgttttatggcctaaatttattaaataaaatgcacaaaactttgattcttttgtatgtaacaattgtttgttctgttttcaggctttgtcattgcatctttttttcatttttaaatgtgttttgtttattaaatagttaatatagtcacagttcaaaattctaaatgtacgtaaggtaaagactaaagtcacccttccaccattgtcctagctacttggttcccctcagaaaaaaattcatgatactcatttcttatgaatctttccagggatttttgagtcctattcaaattcctatttttaaataatttcctacacaaatgatagcataacatatgcagtgttctacaccttgcttttttacttagtagattaaaaattataggaatatcaatataatgtttttaatattttttcttttccattatgctgtagtcttacctaaactctggtgatccaaacaaaatggcttcagtggtgcagatgtcacctacatgttattctagtactagaaactgaagaccatgtggagacttcatcaaacatgggtttagttttcaccagaatggaaagacctgtacccctttttggtggtcttactgagctgggtgggtgtctgttttgagcttatttagagtcctagttttcctacttataaagtagaaatggtgagattgttttctttttctaccttaaagggagatggtaagaaacaatgaatgtcttttttcaaactttattgacaagtgattttcaagtctgtgttcaaaaatatattcatgtacctgtgatccagcaagaagggagttccagtcaagagtcactacaactgattagttgtttagagaatgagaaatggaacagtgaggaatggaggccatatttccatgacttcccttgtaaacagaagcaacagaagggacaagaggctggcctctacatcactctcaccttccaaatcttgtggaagtgcatctacttgccagaaccaaattaacttacttccaagttctggctgcttgcaggtggaactccagctgcaagggagttagggaaatgaaggtctttttttaaaagcttctcagccttcctagggaacagaaattgggtgagccaatctgcaatttctactacaggcattgagaccagttagattattgaaatattatagagagttatgaacacttaaattatgatagtggtatgacattggatagaacatgggatactttagaagtagaattgacagggcatattagttgatgaaatggagtcatttgagtctcttaatagccatgtatcataattaccaagtgaagctggtggaacatatggtctccattttacagttaaggaatataatggacagattaatattgttctctgtcatgcccacaatccctttctaaggaagactgccctactatagcagtttttatatttgtcaatttatgaatataatgaatgagagttctggtacctcctgtctttacaaatattggtgttgtcagtatttttcctttttaaccattccaatcggtgtgtagtgatgtttcattttggttttaatttgtatatccctgatagctataattgggtcatagaaattctttatacattctagatgcaagtctcttgtcggatatatgtattgagatattacacctagtctgtggcttgactgttttctttatgtcttttgatgaatagaagttttaaattttgacaaggtcaaatttatttttttcttttgtttgatattttttctctccaatttaaccccaagatttcagatattctgctctattatataaactttatatttttatatttgtgatctaccttgaattgatatgtatgttgtgaattatggatcagggttctttttttcccccatacaagtatccagtcattgtaacactgtttattgaaagaattatcctttcctcattaaattaccttgccaattagtaaaaaatcaattaaccataatggtggatctgtttctggactttctgtttggttacactgaaatgtttgtccatccttgcactcactcataccatactgccttgaattactgtagctgcatagatgctccttaagttgggattacattgtaataaacgcaatgtaagtta

SEQ ID NO: 412 - DNA, 1500 bp, Homo sapiens
gtaaaccagcctttttttttttttttttttgagacagggtcttgctctatcgcccaggctagagtgcagtggcatgatcatggctcactgcagcatcgaactcctgggctcaagtgatccttctgcctcagcctcctgagtagctgggaatacaggagcatggcaccaagccctgctaactttaaaattttttataaagacagggtcttgccatgttgcccatgctgatcttgaactcctggcctcaagtgatcctcccatcttggcctcccagactgctgggattaaaggagcgagccatggtgctgggcctaaacaagcctttttaaagtgacttttcccccctattacagaatgcttttgaaagccaaaatgtatgtgatcaggagtgtgctctcagatgtttatttagtagtgcgcaggatgtagactacattatgtgggacgtgggtggtgatgggttgggaagctactggaattaggaggagagcttgaaccagcttgagacaggtggaagtggaaaggaagggtattaaatacaggagactgcccagtatttagcatgtgattagctgaaagtgtggcattatgaaataaagacgttaagacaagttgatttgaacttagaaaagagtaaaaataatgagtttacttcgaggtgaaatccttatcttcatcattattatcaccattactagattccaaaggaatacctgcaatttaagaaactgcaaacgcacgaaactacataactggtaagtattttaatgcatttaattaaaaattttccttatgttgctttggagttagtttttaaaattcttttcgttcataatcaggaaaggtagtaaccttacattcagcgacaccttagaaacatacccttttaacgcagcacatttcaatacagattgtgctgttccttttccaaccaccaggtggcgggcaagcgcccaagtcgcactcccgcctcatccaaggcagcctgcgtggctcccgggagcgcgcacgtcccggagcccatgccgaccgcaggcgccgtatccgcgctcgtctagcagccccggttacgcggttgcacgtcggccccagccctgaggagccggaccgatgtggaaactgctgcccgccgcgggcccggcaggaggtaagggcagaagggaagcctcggggcctattttcccggtagcgactgcctcgggggagggcctgcgggtgattcctgcgtcgcgtccgttcctgcccggggacgctgcggaagcggtcgcagaagcggcgagtacgctgtatggcaagcgcatattcttcccgggcagcacggcggctgtgagctggaattcagcgcgggcggtggggtgattgcggcgccccctggtggcagtcctccgcgcccctcccctgactccccctccctcccagcctcacccccgcgccgttgcagcgctagggctggatggcctgcgggtaagcggcagcaggcgcctagtgggaacccccggc

SEQ ID NO: 413 - DNA, 1147 bp, Homo sapiens
cttgagacaggtggaagtggaaaggaagggtattaaatacaggagactgcccagtatttagcatgtgattagctgaaagtgtggcattatgaaataaagacgttaagacaagttgatttgaacttagaaaagagtaaaaataatgagtttacttcgaggtgaaatccttatcttcatcattattatcaccattactagattccaaaggaatacctgcaatttaagaaactgcaaacgcacgaaactacataactggtaagtattttaatgcatttaattaaaaattttccttatgttgctttggagttagtttttaaaattcttttcgttcataatcaggaaaggtagtaaccttacattcagcgacaccttagaaacatacccttttaacgcagcacatttcaatacagattgtgctgttccttttccaaccaccaggtggcgggcaagcgcccaagtcgcactcccgcctcatccaaggcagcctgcgtggctcccgggagcgcgcacgtcccggagcccatgccgaccgcaggcgccgtatccgcgctcgtctagcagccccggttacgcggttgcacgtcggccccagccctgaggagccggaccgatgtggaaactgctgcccgccgcgggcccggcaggaggtaagggcagaagggaagcctcggggcctattttcccggtagcgactgcctcgggggagggcctgcgggtgattcctgcgtcgcgtccgttcctgcccggggacgctgcggaagcggtcgcagaagcggcgagtacgctgtatggcaagcgcatattcttcccgggcagcacggcggctgtgagctggaattcagcgcgggcggtggggtgattgcggcgccccctggtggcagtcctccgcgcccctcccctgactccccctccctcccagcctcacccccgcgccgttgcagcgctagggctggatggcctgcgggtaagcggcagcaggcgcctagtgggaacccccggcaggaagttagcatgggcggaccacacgggggccacacatgacttgtgaagaactactggacagtttggggaaatgactaccacgaaaaggcttactttcagttttgtttcagactccttttccacaatgtcatcagaacaatgggaa

SEQ ID NO: 414 - DNA, 1134 bp, Homo sapiens
ggttcaagcagttctcttgcttcagcctcccaagtagctgggattacaggcttgagcatctttttttatagtttcctgatatttttgtttatcaagttccaaacataatattgtgattgttgctaggtaatacattaagtttttaagttaatttgagggaacattgactcctttcagcattgctttccctttagaaaaatgatgtagccttctatctgtttagataacctttttttctttttctcttttttattgtattttaaattttgttgttgttactcctgaaacaccatagttagataacctttgatagccttcagtgaggctttactgaaaacacaagtttgacatatgtaaagttgactaacatttgaataacaaaggtgttttatttaatatttgtcatacctatatcatatacacttacatgtatgtgtgtgttcgtgtacatgtgtatgtgtctatcaacttatctttttttaaaaaaaaatttatctcaggagaaccatacagacttttgactggcgttgagtacgttgttggaaggaaaaactgtgccattctgattgaaaatgatcagtcgatcagccgaaatcatgctgtgttaactgctaacttttctgtaaccaacctggtatgttactaattttatttcactagtttccagtaagggggttgaaatcacaaaatattctcttggtttgtatgtgagagagagttcacaggatttgtcattttatagagctgtgtagacttttttaatgttaacaaaattaaatacttatattgtggcagtggtaccagtggtatttgttcattttgagatttgaagtttctatttcagtaatttactctttgttttagttagaaactcagaggaagtaggacatagttatttttatttgcttactaaacatttattgtttactattagtttggtgcaaaagtaattgctgtttttgccattagcagtaatgtgtttttatgtgtcagtaactgtgccaaccctgcgaatagaacaatgaacagaccttcatgactctggctcttaaagaggttatgtagctgtgtggaaacgggcatttctcatataatacaagtttttgcaatgggaattgatttgttttattaggg

SEQ ID NO: 415 - DNA, 1149 bp, Homo sapiens
gttttgtttctgttcttttaggtatagaaaaacattttggaaatttctacagaaaaagtaaaattgttactgtaagtcagaaacactagcctataacctcgtattctcatgggactaatttttacaatgtggttttgatactgtaaaacaaacaaaaaaagatctaggaatgaaattgtcatgttttaaatgaaacagactgcaccaaagcaaaaaattctcaaatgtgtgtgaggggtcaggagaatccccactgacttacacaaataaagaacatgtgtgttctaggaggggtattcctgggttaagaaacttccctaaggggaaatatgaattgttagttgagtgatcttcctctcaaggcaaccgaagcagtaattgttgtctgccgtgttgggaggttagccacctgcctattgtcttttcttttgaaaactttttctctgagaagtgaatgtactgagtggtaaaagactttaaattatttgctaacttttcagagtcaaacagatgaaatccctgtattgacattaaaagataattctaagtatggtacctttgttaatgaggaaaaaatgcagaatggcttttcccgaactttgaagtcgggggatggtattacttttggagtgtttggaagtaaattcaggtaagacattttaaaattgattttaaaatggacagctttgtttcagccaaatcctaaaggaaaatgatatttctgattaatgaatttaaaacagtataatttagttcctgcttagcacagtattggactctgtgccatgggtggtgagtgcattttgtacatcacggtgatgagagtttgagtgggccctgagggacttcatgggaagttacatttcttcgattcctcattggtgaaggtataatgttaacttttggtcattgttttttcttcatttggactcaagacttaggatttgataattttctaggttacaaagcttaatgatgaggaactgataatttcataggttacaaagggtaacaataaataaaagttacaataacagtatatgatgtgagcttaaagttttaaagtactaaaaattgccatctctgcaactctgatactatgactttatttaacttattctcatttacagaatagagtatgagcctttg

SEQ ID NO: 416 - DNA, 1160 bp, Homo sapiens
tgtttggaagtaaattcaggtaagacattttaaaattgattttaaaatggacagctttgtttcagccaaatcctaaaggaaaatgatatttctgattaatgaatttaaaacagtataatttagttcctgcttagcacagtattggactctgtgccatgggtggtgagtgcattttgtacatcacggtgatgagagtttgagtgggccctgagggacttcatgggaagttacatttcttcgattcctcattggtgaaggtataatgttaacttttggtcattgttttttcttcatttggactcaagacttaggatttgataattttctaggttacaaagcttaatgatgaggaactgataatttcataggttacaaagggtaacaataaataaaagttacaataacagtatatgatgtgagcttaaagttttaaagtactaaaaattgccatctctgcaactctgatactatgactttatttaacttattctcatttacagaatagagtatgagcctttggttgcatgctcttcttgtttagatgtctctgggaaaactgctttaaatcaagctatattgcaacttggaggatttactgtaaacaattggacagaagaatgcactcaccttgtcatggtatcagtgaaagttaccattaaagtaggttgaatgtcttgttcttatgttaaaaataagttatttgaatttaagcttacccactatacacagatttttttttaattactttaaaactatcagaactgttagttgtagatttatatatacccactccatccctttgtataccatttaggcttgagtggcttttcatataacctgtttattatctgagacaagccaaaagcaactaaaattatatttcagattttgtttagcattttaaaaagcgattctgttgtccttccaccgagaaggttatgacagtgcatactttgtgttttcagtcttaaagcaacgcaactagagattaactgccagtcttcaaagtttgcatctcatgtctttctatcaagttgtctttctccaatctccaggtgattcatctccttttaaacaggttgacctatagatttgtgggatccttttaggttaatatctatagtaaaaagccacaaatacttagattcctttattaaaaa

SEQ ID NO: 417 - DNA, 1104 bp, Homo sapiens
ttaccaaaaattattttatttactttctcaaaaaggctttattgcatagttacaatctttttgaaagacaattagtctaaaaatagctcatgttcatctcctaatattgtcttccctgaagcagatatgttacatttcctcaattctgaaatatatttttaacattttaatgtcttcgaaagtggaatgcattttaaaattgaattttattttatgttgttccaccctttccaaaaaagcagttttaaaaattagtattataatcggtgacttcttataattgagtgattatactgtgatttatgttctaaaataatgcagtgaccaaagaccgacttctattttatagattgtggcttctttataaatttagagagatgaaagggaaaacattattttttatggatgtaaacagcctctttgtagtttataacttaaaacttttctttaaaaaatgctagcatgtgaatatatatattcacatgttttcttcattgtagacaatatgtgcactcatttgtggacgtccaattgtaaagccagaatattttactgaattcctgaaagcagttgagtccaagaagcagcctccacaaattgaaaggtatattatgtattttaaatataacaagatgtcacttatatgatagcattgatttttatttaagttaattccctctttaatgcttgtttcaggatgtaatagttgctgtgttatagttcggtattattaatggaaggttttttgttagtttgtaaagaaagagttccccaaatttctttgttggttattctgtatctctgaaacaaatgttaaatatgtgctaatatttaaagaaaaaaatggaaagacagtaaatggcactgaggtaacctcatggtcagaagagcacatatgtcagttccaggcatcacgccacagttagctctggaattgtgtggtgcagcagccctctttgcaagccacatagtccagaatattaacagcaccatagctttgggaatggagcttagtttttctgagctccagttactcattgcaaaattgagagtaatacctacctagctgagttaaaaagtcaggaaacaacagatgctggcgag

SEQ ID NO: 418 - DNA, 1118 bp, Homo sapiens
tgaactgagtaaataatgtaagtttaaaaatttcctgaacttctccaaagagatctctaacaaaacactcataatagattgtgctagtagaattgaaacatgagcgttttaatagatattggctcctaagtaaacacaagatgctaatagaatttgatctttatggatgatgtttctctcaaacttttgtaattcagacaccttgtttgagtcatgtgtgtttaatgttcatcctgttatgattgtctaccttggattatttattttgagatattaatgatcaattctagctcttctttgtgtcacctgccaccatatttctagaaaacgcgattagatgctttttgtcattttgtcccagataaaattcttacttaaaaaaaatactataaaggtattatggaaattatgccttttgagtgtcagatagtcactccgtttacaatttaatagcaaacatagtagtatataattagaatatactttaattatttttacagtttttacccacctcttgatgaaccatctattggaagtaaaaatgttgatctgtcaggacggcaggaaagaaaacaaatcttcaaagggaaaacatttatatttttgaatgccaaacaggtaattatgttataagctaaattttcctaaagaatacattacaaactaggatacattattaactcttatcagtagttgttaacgtatttcattttgggattttgtgtaaaagtgtgaagtagaataaaaaaaccccaggcaccagacctgcccagtgatcatggctgtgattacggggtttcttaaaatctgtgataactggcctattcataaatatgcaagtgagaaggacaggaaacttagttttaacttctttagttagtaagctaaacctctttagttagtaagctcactaaagaagttaaatcagttgaatatgttctgtgtaccaaagtggggtttccaagagtttatgttgtagtggagaaatgcagataagcccacagttagagtgctgttaggaagtgtgatgaggaaccacagagagtgtaacagttccagggccgcagagacctgttgaactagggactttctcaaagtggaagctgaaatgacctact

SEQ ID NO: 419 - DNA, 1194 bp, Homo sapiens
gaagtagaataaaaaaaccccaggcaccagacctgcccagtgatcatggctgtgattacggggtttcttaaaatctgtgataactggcctattcataaatatgcaagtgagaaggacaggaaacttagttttaacttctttagttagtaagctaaacctctttagttagtaagctcactaaagaagttaaatcagttgaatatgttctgtgtaccaaagtggggtttccaagagtttatgttgtagtggagaaatgcagataagcccacagttagagtgctgttaggaagtgtgatgaggaaccacagagagtgtaacagttccagggccgcagagacctgttgaactagggactttctcaaagtggaagctgaaatgacctactcaagaagtagcaccaagtcttcttgaattgtacttctatgtttcccaaatcaaattcttatgtgttcaaaaaattactacattttactttaaaaaatgtttccttccatttttagcataagaaattgagttccgcagttgtctttggaggtggggaagctaggttgataacagaagagaatgaagaagaacataatttctttttggctccgggaacgtgtgttgttgatacaggaataacaaactcacagaccttaattcctgactgtcagaagaaatggattcagtcaataatggatatgctccaaaggtatagaattattctttattagtaaaaaactgcaagtaggagattttatgtttaaccttttttgttgcttttcacctaacaatgtaaaagtagatacaagaattttttttttttgagacggagtcttgctcttgttgcccaggctggagtgcagtggcacgatctcggctcactgcaacttctgccttctgggttcaagcaattctcctgccttagtctcctgagtagctgcgattataggcacccaccaccacacccagctaatttttgtacttttagtagagacagggttttgccatgtaggccaggctggtcttgaactcctgacctcaggtgatcctcctgcctcagtctcccaaagtgctgggattacaggtatgagccaccgtgcctggcctattttttatttttttgagacagggtcttgctctgttgtccaggctggagtgcagtggcacaatcttagctcactgcaacctctgccttctgggttcaaacga

SEQ ID NO: 420 - DNA, 1098 bp, Homo sapiens
tgagtagctaggattacaagcgtgcaccactacacccagctaatttttgtatttttagtagagatgaggttttaccatgttggccaggctggtctcaaactcctgacctcaagtgatccacccgcctcagcctcccaaagtgctgggattacaggcatgaaccaccatgcctggccataaaagcctgttctgttgtttaatttgggtagtactgtattctttttattccaaaaattgtagaattttagaactgggaagatctatattctttagccccttattttacagatgaagttaatggagttactaaaagatggtagacttgtcaacgtaacagtgccccagcgagtaagctattatagtactctgcatttgaaattctgtctataccataaaattatttgggaggaaaaaaaagaggttgctttatcttgacattatctgaataaaagttgctagttttaatatattatcatacttaaactattttattctaataggcaaggtcttagacctattcctgaagcagaaattggattggcggtgattttcatgactacaaagaattactgtgatcctcagggccatcccagtacaggtaattgaagcattattttattgattcgttagcaactttattatgtaaatcgataagctaaatatacgttactcatatacttgctaggggtgaccatattcaccatgttttaaaattcatccatttatactttcatttattcattccataaatatttgtggctgccatgtagcagaaactgttatgaagtggtaaataaaataagaaagatccttgttattataaactttatgttctgaagatcaagatttagtaaccaaacacacacacatggtaagttcagatcaagccaagtataaagacaggtaaaacaaggtgatgtatgtaatagtgatggtagtaggctatttagataggtattcaaggaaagtctcaggaggtgacatttgagccatgtgtcctgaatgatgggaaaaggcagctgtgtgaggatctgggtggtggataattccaggtagaaggaacagatcactcttaggtttgtgtggagaattctaagg

SEQ ID NO: 421 - DNA, 1130 bp, Homo sapiens
ttcttctggtaagtaaaaagatgaggtaatcattatggttttctggagtagccagaagtttatgtctaagatggttttacatgatttgtttcaaataatgtattccttatgaaaataaaactcactaattctgatttctatagatggtagggtgtatacactttctgtgggggaataaatgtaattttttggcccactgacttaaaacataatttgaattagaatttgcttattttatttttctttcagttgataagacttcagcacaaagtatctgatgtggctttaaaatgatttggtttagataagcccgtcatagatgcccgcaggctgcttatagactgttttgtgtttgttggtaccactcattggagaaaaccatgtgcagtattccctagttaatcccctcagcatggtatagtctaacaattttaagtgaccagatgttcatcttctatctagcagttgtgattctttctttctacttgtgtgatttacaggattaaagacaacaactccaggaccaagcctttcacaaggcgtgtcagttgatgaaaaactaatgccaagcgccccagtgaacactacaacatacgtagctgacacagaatcagagcaagcagatacatggtaaagcttcttcattaccgtactattgttattattctatcaataaattaatagtatattcaggaagtaatgccctttatcaggttgtctcttgagagagaaagcatggaagaatgggataccagggaaaatgatatcttaggacaagggtcagcaggttttctgtaaaggagcggcgagtagttattttcggctttgaagactgttgatctctgtcccagctcctccactctgccactgtagcatgaaagtggccatagacgatatgtagtcattgtcaagagacaatacgtagtctcttaaagacaaggatactttccaagaaatgcttccttacacaattttggcattgtgtgaacatcgaacagtgtgttgacataaacctacatggtatagcgtactgtatagtatagatagcccaggggttccttatctctcagccacggtatcagtccatcacctgttaggaaccaggccacacagcagtaggtgatcagcgg

SEQ ID NO: 422 - DNA, 1273 bp, Homo sapiens
atctggctgaaataatgatatcagttcatttacagtgacctgaatatcttatatgtgattttattctgattttccatttttaataaaaaggtactataataatataataataaataataatgaaagtaccataatagtgattttacgtgggaataatttaaaatttttaaacaaaacagaaattgcctaggattatcacctagtttaacttataataggctatgctaagttggtattctgtgtgtgtttgtcagtcgtctatagtggagcaacaatatgtgctgtagggggtgaagaagagtaaggtatcatccttccacaggatgcttaggtaataaaggagttgctttcttgggatggtaaaatatattcagtgtatttttgtctaaaaattatcttctaaggttatattacgttagaactatttaacgatctttgtttctctattaaagttgctgtaaacttgattatttaccttgcattcttttctttttctacagggatttgagtgaaaggccaaaagaaatcaaagtctccaaaatggaacaaaaattcagaatgctttcacaagatgcacccactgtaaaggagtcctgcaaaacaagctctaataataatagtatggtatcaaatactttggctaagatgagaatcccaaactatcagctttcaccaactaaattgccaagtataaataaaagtaaagatagggcttctcagcagcagcagaccaactccatcagaaactactttcagccgtctaccaaaaaaaggtctgtttttgataacttctctcatgtctctgaaaaaaaaatgaaagttttttatactgttgtagaatggtattgtctttagtctgttctgattaagtatgcttctgctgctgcagctttttgaccgctttccctctcagaaatgtccctgatctccttcactagagccactagacagtttctccttcatctccttctatgtatgtacttacgtgttattttacttgccgcaattctcttcaataagaactaaccccctgtctcagctctaaaatcacatttctgctggttttccttgagaaccgctctcactccctctaggaccatattccatcaattattttctcaatttccatattttgaatatattgatcatcccagatttttttcttctgttttcaaaagttcaatctcacctttatttttgaaaaccttctcttgacctggtttcttcctctagctactgctgccttttttcttgtgccgtcccgttaagcttc

SEQ ID NO: 423 - DNA, 1448 bp, Homo sapiens
ataggaaacttttagtgatatattcacatagcatttgcagtatacagtcagtaccgtattgtagatttagtcactctgacttactgtcttgaatccatctctcattaacccatcagattgtattcccagggcagttttccctgcccacaaccttactacgttataaagtaagttgctgtctcttggcaacagtttctttgtatttttatatttttctaccttttcctgtaatttatcaactaatgcaacttaagcagagaagatagagatcaccgtactgctttagccacagggtccgtcagttctatcaaaacagcagaatgtatgtgagttctgcactgttttcaaaggtctatttgttgatttccagtaatattgttaataaaatcaagagtacattgtgaactaaatggagggagtgatgaatattgccaaactaaatggttacttagctgtgttcattttcttgttttgttttcttctttttttttaaatctaagggaaagggatgaagaaaatcaagaaatgtcttcatgcaaatcagcaagaatagaaacgtcttgttctcttttagaacaaacacaacctgctacaccctcattgtggaaaaataaggagcagcatctatctgagaatgagcctgtggacacaaactcagacaataacttatttacagatacagatttaaaatctattgtgaaaaattctgccagtaaatctcatgctgcagaaaagctaagatcaaataaaaaaagggaaatggatgatgtggccatagaagatgaagtattggaacagttattcaaggacacaaaaccagagttagaaattgatgtgaaagttcaaaaacaggaggaagatgtcaatgttagaaaaaggccaaggatggatatagaaacaaatgacactttcagtgatgaagcagtaccagaaagtagcaaaatatctgtaagtaacattttaaatgagaggtatagtacatagaagcttagaatgctaacaggtactttcgattttgtattgacagtatgagcatccattaatgtctttaacactcagtactatagaaatttgttggttgataaggtaaatggtaaatgttaaaagtacagtgattcttcagtagtgtaaaataaatgaccacaaattaaactttcatatgagattgttttactagatttccaaattaggctgtactattataaaagacatttggctatgatgataagtgtaggagatgcttcagtataagaaacaggcacagaaagatgaagttagtaaaacaaagtatctactcaataaatttttaggatataacatcactaggaattttcattttcatttaggttttgtaatgtccttgtctattttcatgactgttgataatttgtcttacccactttgatctatgaaaacacctgagattattttcttttttgtatacatca

SEQ ID NO: 424 - DNA, 1069 bp, Homo sapiens
gtaaacttgaattcttttaaaatgtttcttttttgattttaaaagtaatacacgatcgtacagacatgtagaaaataaaacagacagtttgttgataatcctaccatctacagacaaccatggttaatattttggtattttctctttccattttattttgcagactgttagtgcaattttgtagtcattttttaaatttacttataatcattttcccatattgttaaatattctctaagcatgtgatttatatggatttagatcgcttccaattctttgtcctgatactgcagtatctctttcaatatatattttcatctcataatttcttttggaaagacagttgaaagccaaatgcctggtcatacataacatgaatatctcttaagtttttagaaaggaaccattttacacttcatcttattcaaaaggccaagaagtgatagaaacataccattttattactcctatgaacagtattttttattttatttctttagcaagaaaatgaaattgggaagaaacgtgaactcaaggaagactcactatggtcagctaaagaaatatctgtgagaaacgttttattaatttttatacagatttggcttacggggactgtcatctcatcaatttttgtgattttacattcttaggattatttctctttcctaattatggcttacttcatgattgtgccttgaaatggattgatcatggtattattattattattattttatttatttgtttatttatttattttgagacggaatctcgctcttgttgcccaggctggaatgcaatggtgtgatctcggctcaccgcaacctcagcctcctgggtttaagctattctcctccctcagcctcccgagtagctaggactacaggcatgtgccaccacgcccgactaattttgaatttttaatagagacggggtttctctatgttggtcaggctggtctggaactcccgacctcaggtgatctgcccgccttggcctcacaaagtgctgggattacaggcttgagccaccatgcacggcctggatagatcgtattataaccatg

SEQ ID NO: 425 - DNA, 1156 bp, Homo sapiens
gtccagaactgatgattgacttttttgaggtgttaagaataataaaagatacaaactcttgagaatcccaaaagtttaagaaaagtagatgaggacctgtagaacaggatatattataatctcagtgtacaattttaatgaaaagcaaacagtgctgagattttgtgtcaataagatatatatctggaggtaaattgtttactgagatgatatttattagaataactactaggttaaaaatgcttcacagtttttagccttctgtcacagatgagtatgttataaatgtttccaaagtttatagagcatttgagtaagtaattttcttatcttgaattagctacaatttgattccaaatacaaagttcaggtacaagaaataaaacatttttactattttttcaggtatttgaacttttttctatagattcccaaatgacaagtgacttttctttgttatttcttctctttcttacctatccatcttaaccccatttaagaacaatgacaaacttcaggatgatagtgagatgcttccaaaaaagctgttattgactgaatttagatcactggtgattaaaaactctacttccagaaatccatctggcataaatgatgattatggtcaactaaaaaatttcaagaaattcaaaaaggtaggtatttcaactgtatcacaagaggtcagtgtttgaaatgtttttagagataccagtgatgctaaacaaagataaaagcagtttatgttgaaaactgatacttcttctgcttaaaatgctttaaaaaattcctctaggaaggatatgaacttacagttaatgaatatattgaacacctagaatgaaatagatttcatcaagattgaattctttagaggttgctgtttacctggttttctctaccttaagcaggaagtttttgttgataatcacaggatcttctctgttagtctaatattggtctacaactacttgaggaggttctttagctcaggactttatgaagattaaaatgtatttaaaataactaagcatattcagtaattcaaactatagtctatatttacatataaaacacaatataaatatatatgctgagtatgatcatcagacctgagtttctgctcattaaggaactgatacttattttatcagta

SEQ ID NO: 426 - DNA, 1114 bp, Homo sapiens
tttactagtaaacaattaaaatatcaattagaagtataaattgttggcatccccaacatctcctgcttggactctgtgaactggaaagttttgaaaaagatttaaattttcatcaatattagaaagggcttaagctttgaagtcattagaacaaaatacagtgctttgaattgtagtgtttgtgttcatcttgagttgctttaattgttaaatgataaggtaaggccattttaaaataaaaactccaaatgaaaagtgttaaattatttttaatacataaatcccatgacatgtccagatctgtatatagtaatagctataaaagaagggcaaaaacagatgggtttagaacagagttactgctctcacttttatttgtagaatataaacatctttggcacttatgcatgatttaccatctttgctttttaatctttttaaaaaaatggtcatttttgtttgttaatatgatttactgtactacttttattattcaataggtcacatatcctggagcaggaaaacttccacacatcattggaggatcagatctaatagctcatcatgctcgaaagaatacagaactagaagagtggctaaggcaggaaatggaggttagtaggaagtgaggcccagaaacttgcttaaattgcactttggtccattatggtggccttcaagcaaattcttcttaaaaccaaattaaaataagtgacataaagtcattcattcaggagcattcctgagttacagagcattaatctatacccttccataacacttctttaaaagaatactaaatttatttttgttaaaaaaaaaaaaaaaggtgagacctaagaaattcagtttacatcctaatgaaaagggggagataaaagccacaaaaatttaagggaaactaaaagaatgtggaggatattacaaatatatcacttaaatgtatgtcaagggactggcctttttaaatctggggattgtgttttaacaattctgaaaatttcttattcattctcttgaatattagttacctttttactgttttccccattatctccttctggaattccaacttaacgtaagttaaattttcttttccatttgtctttcctgt

SEQ ID NO: 427 - DNA, 1050 bp, Homo sapiens
tgctgtagaagtttagtgagtttgtatttaaaaggacttcagaggagaggtaatttagcagcagcttctaagccctgatgtgggaccaagaacacaggagcctctttaactgtggagctgctctagttgaaggtggggtaaatgttgccctcttagtctcatcagtggtctgacccccaagcactgaaatctcatttagtaaaagggttttgctggaaagagtgtttaaaaactcagcaagctagcaatatactattggttgtctttgagtggagatgggtgggagaaagctgtttagttagagctcttttgtaataatcttagcatggattgaaaatatagaggatcagttgaatgaaatattgtagaggcaagaactcagatgtggtgacctccaggatgtggaaatctctaagatgacagtgacctatcactatagcaattcattaactatatattcaccactgagcaaatgtttgaaattatgttaattttgacaggtacaaaatcaacatgcaaaagaagagtctcttgctgatgatctttttaggtaaagtttgattcacctttctcatgtacctttgagagatgtatataaaatttagttctgttcatagaaattaagaatttgtttcttctgtcctcatagacacctagtcccttcacctaacacaagtgtttatttttattacttaagcacctctcaattgggtttattggctatagcatcgaggtttggggttaagttataagatacttaaaatttgtatgggggcattcaggcaaaaagacggttcccgaattgtgtgaaattgttgtatagatttgtgagatttttcagctctgagtagaattacgattgagttttgaattaagacaagtaaaatgccagaccatttgtttagtttttattggcacatgcataaaaacaaaaggctagattaaagtttcaaagcaggtttttgtgggaggttttagagttgtactttgtgattataatttaattctgatttaatacattttcagcattcctgcaggcctaacaaacct

SEQ ID NO: 428 - DNA, 3277 bp, Homo sapiens
atctcaaaaaaaaaaaaaaaaaaaagtgttgacagacaatactggtttttcattagtcaaatgagatgggttgttcagccatatttgtttaactgctgtaggagaaaatgttgtaaagtgctaattacatttaagtagattatgctcttttgtgcaaatgatatgcttttattatggggaggaatggggatctttgaagccatacagaaagaagtgtaaacataccttcatttttaaactgttttcattaattattttaaagctttaaaggatttttgttattgttgattttttttttgtttttaccatattttcatcaaagcaacatcaaagggatacatgaaaataaaaatgtcagtgcttagtatctgatcctaaggacaaaattgtcattcccatcctatttgccaaagtgtgactacagtttgaaagttctttacctttaaaagaaataccatcccttatctaaatatcatttaaccccatttctttctttgcagatacaatccttatttaaaaaggagaagataactgaggattttaaaaagaagccatggaaaaacttcctagtaagcatctacttcaggccaacaaggttatatgaatatatagtgtatagaagcgatttaagttacaatgttttatggcctaaatttattaaataaaatgcacaaaactttgattcttttgtatgtaacaattgtttgttctgttttcaggctttgtcattgcatctttttttcatttttaaatgtgttttgtttattaaatagttaatatagtcacagttcaaaattctaaatgtacgtaaggtaaagactaaagtcacccttccaccattgtcctagctacttggttcccctcagaaaaaaattcatgatactcatttcttatgaatctttccagggatttttgagtcctattcaaattcctatttttaaataatttcctacacaaatgatagcataacatatgcagtgttctacaccttgcttttttacttagtagattaaaaattataggaatatcaatataatgtttttaatattttttcttttccattatgctgtagtcttacctaaactctggtgatccaaacaaaatggcttcagtggtgcagatgtcacctacatgttattctagtactagaaactgaagaccatgtggagacttcatcaaacatgggtttagttttcaccagaatggaaagacctgtacccctttttggtggtcttactgagctgggtgggtgtctgttttgagcttatttagagtcctagttttcctacttataaagtagaaatggtgagattgttttctttttctaccttaaagggagatggtaagaaacaatgaatgtcttttttcaaactttattgacaagtgattttcaagtctgtgttcaaaaatatattcatgtacctgtgatccagcaagaagggagttccagtcaagagtcactacaactgattagttgtttagagaatgagaaatggaacagtgaggaatggaggccatatttccatgacttcccttgtaaacagaagcaacagaagggacaagaggctggcctctacatcactctcaccttccaaatcttgtggaagtgcatctacttgccagaaccaaattaacttacttccaagttctggctgcttgcaggtggaactccagctgcaagggagttagggaaatgaaggtctttttttaaaagcttctcagccttcctagggaacagaaattgggtgagccaatctgcaatttctactacaggcattgagaccagttagattattgaaatattatagagagttatgaacacttaaattatgatagtggtatgacattggatagaacatgggatactttagaagtagaattgacagggcatattagttgatgaaatggagtcatttgagtctcttaatagccatgtatcataattaccaagtgaagctggtggaacatatggtctccattttacagttaaggaatataatggacagattaatattgttctctgtcatgcccacaatccctttctaaggaagactgccctactatagcagtttttatatttgtcaatttatgaatataatgaatgagagttctggtacctcctgtctttacaaatattggtgttgtcagtatttttcctttttaaccattccaatcggtgtgtagtgatgtttcattttggttttaatttgtatatccctgatagctataattgggtcatagaaattctttatacattctagatgcaagtctcttgtcggatatatgtattgagatattacacctagtctgtggcttgactgttttctttatgtcttttgatgaatagaagttttaaattttgacaaggtcaaatttatttttttcttttgtttgatattttttctctccaatttaaccccaagatttcagatattctgctctattatataaactttatatttttatatttgtgatctaccttgaattgatatgtatgttgtgaattatggatcagggttctttttttcccccatacaagtatccagtcattgtaacactgtttattgaaagaattatcctttcctcattaaattaccttgccaattagtaaaaaatcaattaaccataatggtggatctgtttctggactttctgtttggttacactgaaatgtttgtccatccttgcactcactcataccatactgccttgaattactgtagctgcatagatgctccttaagttgggattacattgtaataaacgcaatgtaagttgaaaatactgtatttaagtcaaaagtgcatttaatacaccttaacctacgtcatagcttagcctagcctaccttaaatgtactcatgacacagtagcctatagttgggcaaaatcatctaacacaaaagctattttattgtaaagtactgaatatttcatctaatttattgaatagtaaactgaaagcaaaaaacagaatgattgtgtagctactcactataaacatacacagctgaaagcgcactgggcctgaagaatgtttgaagcattgaactaaaattgcggcatgatggggaatactacagcaacaggattatcaatttccctactgattaggcttgagtagaagcattggttgaaggcactaagggcatcaatacttgatggtttagcaggaatagtgttcttcacaaagagcaagaatcagtttttaccctcttgatgctgtggctgacgggaagctacggcttgctgctgctgcccagcattgcaagattga

SEQ ID NO: 429 - DNA, 1500 bp, Homo sapiens
ggatatatgtattgagatattacacctagtctgtggcttgactgttttctttatgtcttttgatgaatagaagttttaaattttgacaaggtcaaatttatttttttcttttgtttgatattttttctctccaatttaaccccaagatttcagatattctgctctattatataaactttatatttttatatttgtgatctaccttgaattgatatgtatgttgtgaattatggatcagggttctttttttcccccatacaagtatccagtcattgtaacactgtttattgaaagaattatcctttcctcattaaattaccttgccaattagtaaaaaatcaattaaccataatggtggatctgtttctggactttctgtttggttacactgaaatgtttgtccatccttgcactcactcataccatactgccttgaattactgtagctgcatagatgctccttaagttgggattacattgtaataaacgcaatgtaagttgaaaatactgtatttaagtcaaaagtgcatttaatacaccttaacctacgtcatagcttagcctagcctaccttaaatgtactcatgacacagtagcctatagttgggcaaaatcatctaacacaaaagctattttattgtaaagtactgaatatttcatctaatttattgaatagtaaactgaaagcaaaaaacagaatgattgtgtagctactcactataaacatacacagctgaaagcgcactgggcctgaagaatgtttgaagcattgaactaaaattgcggcatgatggggaatactacagcaacaggattatcaatttccctactgattaggcttgagtagaagcattggttgaaggcactaagggcatcaatacttgatggtttagcaggaatagtgttcttcacaaagagcaagaatcagtttttaccctcttgatgctgtggctgacgggaagctacggcttgctgctgctgcccagcattgcaagattgagtattctatgggcacattactagccagggaaaagaacaaaattcaaagtaggctttctactgaatgtctatcactcttgtactaccatctagtcaaaaaatggtaagtcaggactatgcaggaagtctagaagtcagatacatcagtcctctgagcatgtcaatttctatcccaaaaatcggctagaattattgtgctgaatctaaaaatcaatttgtgaagaactgacatcttaaaaatattcagtctttcaatccatgcatgtaaaatgtctattcatttacttagatctactctttccacattgttttgtagtttcactgtagaggctcagacatctgttttaatctgtccctaagcatttttttggtactgtaaacgatactttcagaaagttcatcttgcaatgatttattctatatgaaaatacaattacttttggtgtatagaatttggatcctgtgaacttgctaatctcacctattctggcaaaatttttt

SEQ ID NO: 430 - DNA, 4069 bp, Homo sapiens
gcaggccgaatggtggatttaattggccggagtttagggcgcgcttggcccgcgtgggtcagctgatcgcgcactgagggtgcgatcccgggctccccattccttcctggggcgcctccccggcccagggccaactgggtcccggtgtcggcaggcctggggtcggcgacggctgctcttttcgttctgtcgcctgcccgatggacgagcctcccgggaagcccctcagctgtgaggagaaggaaaagttaaaggagaaattagcattcttgaaaagggaatacagcaagacactagcccgccttcagcgtgcccaaagagctgaaaagattaagcattctattaagaaaacagtagaagaacaagattgtttgtctcagcaggatctctcaccgcagctaaaacactcagaacctaaaaataaaatatgtgtttatgacaagttacacatcaaaacccatcttgatgaagaaactggagaaaagacatctatcacacttgatgttgggcctgagtcctttaaccctggagatggcccaggaggattacctatacaaagaacagatgacacccaagaacattttccccacagggtcagtgaccctagtggtgagcaaaagcagaagctgccaagcagaagaaagaagcagcagaagaggacatttatttcacaggagagagactgtgtctttggcactgattcactcagattgtctgggaaaagactaaaggaacaggaagaaatcagtagcaaaaatcctgctagatcaccagtaactgaaataagaactcaccttttaagtcttaaatctgaacttccagattctccagaaccagttacagaaattaatgaagacagtgtattaattccaccaactgcccaaccagaaaaaggtgttgatacattcctaagaagacctaatttcaccagggcgactacagttcctttacagactctatcagatagcggtagtagtcagcaccttgaacacattcctcctaaaggtagcagtgaacttactactcacgacctaaaaaacattagatttacttcacctgtaagtttggaggcacaaggcaaaaaaatgactgtctctacagataacctccttgtaaataaagctataagtaaaagtggccaactgcccacaagttctaatttagaggcaaatatttcatgttctctaaatgaactcacctacaataacttaccagcaaatgaaaaccaaaacttaaaagaacaaaatcaaacagagaaatctttaaaatctcccagtgacactcttgatggcaggaatgaaaatcttcaggaaagtgagattctaagtcaacctaagagtcttagcctggaagcaacctctcctctttctgcagaaaaacattcttgcacagtgcctgaaggccttctgtttcctgcagaatattatgttagaacaacacgaagcatgtccaattgccagaggaaagtagccgtggaggctgtcattcagagtcatttggatgtcaagaaaaaagggtttaaaaataaaaataaggatgcaagtaaaaatttaaacctttccaatgaggaaactgaccaaagtgaaattaggatgtctggcacatgcacaggacaaccaagttcaagaacctctcagaaacttctctcattaactaaagtcagctctcccgctgggcccactgaagataatgacttgtctaggaaggcagttgcccaagcacctggtagaagatacacaggaaaaagaaaatcagcctgcaccccagcatcagatcattgtgaaccacttttgccaacttctagcctgtcgattgttaacaggtccaaggaagaagtcacctcacacaaatatcagcacgaaaaattatttattcaagtgaaagggaagaaaagtcgtcatcaaaaagaggattccctttcttggagtaatagtgcttatttatccttggatgatgatgctttcacggctccatttcatagggatggaatgctgagtttaaagcaactactgtcttttctcagtatcacagactttcagttacctgatgaagactttggacctcttaagcttgaaaaagtgaagtcctgctcagaaaaaccagtggagccctttgagtcaaaaatgtttggagagagacatcttaaagagggaagctgtatttttccagaggaactgagtcctaaacgcatggatacagaaatggaggacttagaagaggaccttattgttctaccaggaaaatcacatcccaaaaggccaaactcgcaaagccagcatacaaagacgggcctttcttcatccatattactttatactcctttaaatacggttgcgcctgatgataatgacaggcctaccacagacatgtgttcacctgctttccccatcttaggtactactccagcctttggccctcaaggctcctatgaaaaagcatctacagaagttgctggacgaacttgctgcacaccccaacttgctcatttgaaagactcagtctgtcttgccagtgatactaaacaattcgacagttcaggcagcccagcaaaaccacataccaccctgcaagtgtcaggcaggcaaggacaacctacctgtgactgtgactctgtcccgccaggaacacctccacccattgagtcattcacttttaaagaaaatcagctctgtagaaacacatgccaggagctgcataaacattccgtcgaacagactgaaacagcagagcttcctgcttctgatagcataaacccaggcaacctacaattggtttcagagttaaagaatccttcaggttcctgttccgtagatgtgagtgccatgttttgggaaagagccggttgtaaagagccatgtatcataactgcttgcgaagatgtagtttctctttggaaagctctggatgcttggcagtgggaaaaactttatacctggcacttcgcagaggttccagtattacagatagttccagtgcctgatgtgtataatctcgtgtgtgtagctttgggaaatttggaaatcagagagatcagggcattgttttgttcctctgatgatgaaagtgaaaagcaagtactactgaagtctggaaatataaaagctgtgcttggcctgacaaagaggaggctagttagtagcagtgggaccctttctgatcaacaagtagaagtcatgacgtttgcagaagatggaggaggcaaagaaaaccaatttttgatgccccctgaggagactatactaacttttgctgaggtccaagggatgcaagaagctctgcttggtactactattatgaacaacattgttatttggaatttaaaaactggtcaactcctgaaaaagatgcacattgatgattcttaccaagcttcagtctgtcacaaagcctattctgaaatggggcttctctttattgtcctgagtcatccctgtgccaaagagagtgagtcgttgcgaagccctgtgtttcagctcattgtgattaaccctaagacgactctcagcgtgggtgtgatgctgtactgtcttcctccagggcaggctggcaggttcctggaaggtgacgtgaaagatcactgtgcagcagcaatcttgacttctggaacaattgccatttgggacttacttctcggtcagtgtactgccctcctcccacctgtctctgaccaacattggtcttttgtgaaatggtcgggtacagactctcatttgctggctggacaaaaagatggaaatatatttgtataccactattcataagttagggtaaagtgaaaacacaattttctggatatattgggcctcttagtattttttggagttttaaatataaaggagaatatctgaatgacacttaaaatgattgcttgtttatgtccagacagacttattttttattctaatgatggtagcaccactgatcttggatgtacatttatgtatactttgagaaaaagggttttaggttgatttttgtaatttcccacatttgtacatgtgcttttaaaggtgtacataaagcttcaaatggcaataaatatttatttttatacattcaaaaaaaaaaa

SEQ ID NO: 431 - DNA, 1500 bp, Homo sapiens
ctatgagtatcagagttgtgagaaagcaaagaaaaccaaaataacgatagtaacgttaattgaccacttgccctgtttccaagattttacaaacatatcatgtactgatcataaagaaccaaatcggcagggtgcggtggctcacgcctgtaatgccagcactttgggaggccgaggcgggtcgatcacctgaggtcaagagttagggacctgcctggccaacacggtgaaaccccgtctctaccaaaaaatacaaaaattagccgggcgtggtggcgggcgcctgtaatcccagctactcgagacgctgaggcaggagaatcgcttgaacccgggaggcggaggttgcagtgagcagagatcgcgccgcggccctcaggactgggcgacagagtctccgccccccaacccccttcctcaaaaaaaaagaaccgaatcgtttttagcgcaagttaacagatacaaaaggcagtgtaaaagggcccgaagtccgagctgtaattcgtatgaacaggatgggacttgtcctatcctcccgaaggcactttacccctatgagaaaatcaggaataaatacaaaaggcctcaactggccaagcgcggagtaaacagcaaagccagacggtacacggggcatcgctagataatccgggactaatggccaaagggacaggggttggtggggtaggggcaggttgggaacgccgaccaggcctcaaagggacgcagggttggaaagaggaggatacatatctggacccgcgcaccgtctcgatgtactcagacttgttgtagagcagctcgcccaactccatggccgccgcctccttccctcagccccggatcctgtcagagtcagtcggtcagtctttcagagattccggctacttccggccgctcctccacttccgctccaggtggcccactgggactcatcgacagcgcggctctcctttaggcggcctcgctccactgctcggccgtctacggctgcgcgtgcgcaggccgaatggtggatttaattggccggagtttagggcgcgcttggcccgcgtgggtcagctgatcgcgcactgagggtgcgatcccgggctccccattccttcctggggcgcctccccggcccagggccaactgggtcccggtgtcggcaggcctggggtcggcgacggctgctcttttcgttctgtcgcctgcccgatggacgagcctcccgggaagcccctcagctgtgaggagaaggaaaaggtgccgggggtgcgggaagggcggacgcaggactctgaccccgctttcccagggttttaggcctggctttgtgtcctcggcagtccgagggcagcagtatcatctgaccaccccctcctcttagggctgagggggcacagaaaatgaaaatgtggaaatagcgtggtgctcacgtggtggcgtttaaagaacaaatttcattacagtagcagcgcattaatacaatgtgtaacagtttgtagataaagctgt

SEQ ID NO: 432 - DNA, 1248 bp, Homo sapiens
attcgtatgaacaggatgggacttgtcctatcctcccgaaggcactttacccctatgagaaaatcaggaataaatacaaaaggcctcaactggccaagcgcggagtaaacagcaaagccagacggtacacggggcatcgctagataatccgggactaatggccaaagggacaggggttggtggggtaggggcaggttgggaacgccgaccaggcctcaaagggacgcagggttggaaagaggaggatacatatctggacccgcgcaccgtctcgatgtactcagacttgttgtagagcagctcgcccaactccatggccgccgcctccttccctcagccccggatcctgtcagagtcagtcggtcagtctttcagagattccggctacttccggccgctcctccacttccgctccaggtggcccactgggactcatcgacagcgcggctctcctttaggcggcctcgctccactgctcggccgtctacggctgcgcgtgcgcaggccgaatggtggatttaattggccggagtttagggcgcgcttggcccgcgtgggtcagctgatcgcgcactgagggtgcgatcccgggctccccattccttcctggggcgcctccccggcccagggccaactgggtcccggtgtcggcaggcctggggtcggcgacggctgctcttttcgttctgtcgcctgcccgatggacgagcctcccgggaagcccctcagctgtgaggagaaggaaaaggtgccgggggtgcgggaagggcggacgcaggactctgaccccgctttcccagggttttaggcctggctttgtgtcctcggcagtccgagggcagcagtatcatctgaccaccccctcctcttagggctgagggggcacagaaaatgaaaatgtggaaatagcgtggtgctcacgtggtggcgtttaaagaacaaatttcattacagtagcagcgcattaatacaatgtgtaacagtttgtagataaagctgtatcgacacccttgctcctcccccctcccacaccctcaatctttacttctccccccggacggcctcaagtaaatcttttaagtctggtacttccaggtcctttcgtgtgttaatgtgggtggtggaggaggggcgtatccctaaccaccaaaaaggaatcctatgtatattttttggagaagggaatgttcataaatggtatgatctgaatggttctgcaggttccgtttagctttcctgtcaggacat

SEQ ID NO: 433 - DNA, 1060 bp, Homo sapiens
ctaattgacacatagtgggtatcaattattattccaggtactagagatacctggaccattaacggataaatagaagattcatttgttgagtgactgaggatggcagttcctgctaccttcaaggatctggatgatggggagaaacagagaacatagtgtgagaatactgtggtaaggaaagtacagaggactggtagagtgtctaacctagatttggagaaggacctagaagtctatcccagggaaataaaaatctaagctaaggtttgaggaatcagtaggaattggcaaaggaaggacatgttccagatgataggaacaggttatgcaaagatcctgaaatggtcagagcttggtgctttttgagaaccaaaagtagattgttatggaccagtgctactccctgcctcttgccaagggaccccgccaagcactgcatcccttccctctgactccacctttccacttgcccagtattgttggtgtttttcttcttccagttaaaggagaaattagcattcttgaaaagggaatacagcaagacactagcccgccttcaggtaagtgaatcgtattctcaaattaaggtgttatagtacaaacaatttaaaaacagttcttgactctataaaactttaaagaaaacgtatttctggggctgtttttgtctcctctagcgtgcccaaagagctgaaaagattaagcattctattaagaaaacagtagaagaacaagattgtttgtctcagcaggatctctcaccgcagctaaaacactcaggtaaatctagaccattcacttatgcctgctttattattcatttcccaggtatattttggctattgttctttttcccacagtgtgaagataatgactagcaatagacgctttaattttaattttaattttaattttatttttttgagacagagtctcactctttgttacccaggctggagtgcagtggcacaatcttggctcactacaacctccaactcccaggctcaagtgattctcgtgcctcagcctcctgagtagctgggactacaggcacgtgcac

SEQ ID NO: 434 - DNA, 1103 bp, Homo sapiens
aaagtacagaggactggtagagtgtctaacctagatttggagaaggacctagaagtctatcccagggaaataaaaatctaagctaaggtttgaggaatcagtaggaattggcaaaggaaggacatgttccagatgataggaacaggttatgcaaagatcctgaaatggtcagagcttggtgctttttgagaaccaaaagtagattgttatggaccagtgctactccctgcctcttgccaagggaccccgccaagcactgcatcccttccctctgactccacctttccacttgcccagtattgttggtgtttttcttcttccagttaaaggagaaattagcattcttgaaaagggaatacagcaagacactagcccgccttcaggtaagtgaatcgtattctcaaattaaggtgttatagtacaaacaatttaaaaacagttcttgactctataaaactttaaagaaaacgtatttctggggctgtttttgtctcctctagcgtgcccaaagagctgaaaagattaagcattctattaagaaaacagtagaagaacaagattgtttgtctcagcaggatctctcaccgcagctaaaacactcaggtaaatctagaccattcacttatgcctgctttattattcatttcccaggtatattttggctattgttctttttcccacagtgtgaagataatgactagcaatagacgctttaattttaattttaattttaattttatttttttgagacagagtctcactctttgttacccaggctggagtgcagtggcacaatcttggctcactacaacctccaactcccaggctcaagtgattctcgtgcctcagcctcctgagtagctgggactacaggcacgtgcactaccacacctgactaattgttatatttttagtagagatggggtttcgccatgttggccaggccggtcttgaacccctggcttcaaatgatctgtctgcctgggcctcccaaagtgctgggatacaggtgtgagccactgtgcccggctgcaatatattctaattaacataaaattcatatgccgtaaaatctatagtctctattttcagttagactgttt

SEQ ID NO: 435 - DNA, 2473 bp, Homo sapiens
tgggagtgttattaaaattacttgagccaagggggaaaataaagaaagaaatacatgagatagaaaactagttgagatttagaagttaagagaagagattgtgtgataaagaatactctgttcgtttaaaaaacatttttagcacaatgctgtttgtttatatgtacttaaaatttcatagattattagaatttaaaaaatcagaacttttaaaaatatgtacagtatggagtatgtacagttcctttacatactccatcagatagtagaagtagtcaacaccttgaacacattcctcctaaaggtaacagtgaccttactactcacagcctaaaaaataggtttatttcacctgtaaattcatctgcctgaatgaaatgtcactgattctttcttaaataaatgtttagtagtatttatatataataggttaaaaatgagtattttttgttttattttataagaaaaatataagttatatacatttttttcctcctcagaacctaaaaataaaatatgtgtttatgacaagttacacatcaaaacccatcttgatgaagaaactggagaaaagacatctatcacacttgatgttgggcctgagtcctttaaccctggagatggcccaggaggattacctatacaaagaacagatgacacccaagaacattttccccacagggtcagtgaccctagtggtgagcaaaagcagaagctgccaagcagaagaaagaagcagcagaagaggacatttatttcacaggagagagactgtgtctttggcactgattcactcagattgtctgggaaaagactaaaggaacaggaagaaatcagtagcaaaaatcctgctagatcaccagtaactgaaataagaactcaccttttaagtcttaaatctgaacttccagattctccagaaccagttacagaaattaatgaagacagtgtattaattccaccaactgcccaaccagaaaaaggtgttgatacattcctaagaagacctaatttcaccagggcgactacagttcctttacagactctatcagatagcggtagtagtcagcaccttgaacacattcctcctaaaggtagcagtgaacttactactcacgacctaaaaaacattagatttacttcacctgtaagtttggaggcacaaggcaaaaaaatgactgtctctacagataacctccttgtaaataaagctataagtaaaagtggccaactgcccacaagttctaatttagaggcaaatatttcatgttctctaaatgaactcacctacaataacttaccagcaaatgaaaaccaaaacttaaaagaacaaaatcaaacagagaaatctttaaaatctcccagtgacactcttgatggcaggaatgaaaatcttcaggaaagtgagattctaagtcaacctaagagtcttagcctggaagcaacctctcctctttctgcagaaaaacattcttgcacagtgcctgaaggccttctgtttcctgcagaatattatgttagaacaacacgaagcatgtccaattgccagaggaaagtagccgtggaggctgtcattcagagtcatttggatgtcaagaaaaaagggtttaaaaataaaaataaggatgcaagtaaaaatttaaacctttccaatgaggaaactgaccaaagtgaaattaggatgtctggcacatgcacaggacaaccaagttcaagaacctctcagaaacttctctcattaactaaagtcagctctcccgctgggcccactgaagataatgacttgtctaggaaggcagttgcccaagcacctggtagaagatacacaggaaaaagaaaatcagcctgcaccccagcatcagatcattgtgaaccacttttgccaacttctagcctgtcgattgttaacaggtccaaggaagaagtcacctcacacaaatatcagcacgaaaaattatttattcaagtgaaaggtaaatcaagatgtgtttgatgatgatgatgatgatgatgaaagttaacaattactatttgcctggcacttccttttctttcttttctaaaaagtgacagggccaagtgtggtggcttacgtctgtaatcccagcactttgggaggctgaggaacagagtgagaccctggctcaaaaaaatttaaataaataaataaataaataaataaataaataaataaaaataaagagacaggggctcactgttgtccaggctggagtgccgtggtgcagcctctatctcctgggctcaaatgttcctcctgcctcagcctcccaactagctgggactactggcatgtaccaccatgcctggctaatgttttaaaattttttgtagaggtgaggtcctgccctgttgcccaggctgatcttgaactcctggcctcaaacaatcctcccaccacagcctctcaaagtgctgggattacagacgtgagccactgtgtccagcttgcctg

SEQ ID NO: 436 - DNA, 1830 bp, Homo sapiens
atttttatttatttatttattgtttttaaagacagtctcactgtgttgcccaggctggtctggaactcctgggctcaagcaattctcttaccttgacctctgaaagtactaggattacagctgtgagctaccatacctggctagcaatacactgttttgggtagtgcagaaaaatagctgctaattaatcaactaactcatgaccgttgtttgaacccttcgcccaagtttctgagtcatggatgggaaaagtaatgaacattttttagtatatttgagtttagaagctcactctttgttgggtattacatttaagaatggtttaacatgtttctttgataggacttcattgtaaacattaagttcattctggggaaattaaggttcattaaaatgtttcttttaaatctaggagatcctattctctttgtcatcagtgaaacagattgtctgttttgttgggttttgttactattttgtgacttatttttcttctttagggaagaaaagtcgtcatcaaaaagaggattccctttcttggagtaatagtgcttatttatccttggatgatgatgctttcacggctccatttcatagggatggaatgctgagtttaaagcaactactgtcttttctcagtatcacagactttcagttacctgatgaagactttggacctcttaagcttgaaaaagtgaagtcctgctcagaaaaaccagtggagccctttgagtcaaaaatgtttggagagagacatcttaaagagggaagctgtatttttccagaggaactgagtcctaaacgcatggatacagaaatggaggacttagaagaggaccttattgttctaccaggaaaatcacatcccaaaaggccaaactcgcaaagccagcatacaaagacgggcctttcttcatccatattactttatactcctttaaatacggttgcgcctgatgataatgacaggcctaccacagacatgtgttcacctgctttccccatcttaggtactactccagcctttggccctcaaggctcctatgaaaaagcatctacagaagttgctggacgaacttgctgcacaccccaacttgctcatttgaaagactcagtctgtcttgccagtgatactaaacaattcgacagttcaggcagcccagcaaaaccacataccaccctgcaagtgtcaggcaggcaaggacaacctacctgtgactgtgactctgtcccgccaggaacacctccacccattgagtcattcacttttaaagaaaatcagctctgtagaaacacatgccaggagctgcataaacattccgtcgaacaggtacaatccatttcctctgtgaaattttctctgaaggaatgaaatgccttagtgaatgtaaacagcatgacttgcttgcgcattgggccttccacgtttaagaatggtttgacgtgtttctttgatatgatttcattgtaatcattaagttcattctggggaaattaaggttcattaaaatgtttcttttaaatatgggaggtcctattctctttgttatcagtgaaacagtttgcatttggagctttgctgctgttataagaggaaataaagacaatacgaagtagacattttgatgagtgggtaatgcaggcagacattatacataaagtgtagactaatgatgtgacttttgttttcacagactgaaacagcagagcttcctgcttctgatagcataaacccaggcaacctacaattggtttcagagttaaaggtcagaagaatattctcttccagtgtctcgtgtcttacatatgaaaactttaatgaactgaaaa

SEQ ID NO: 437 - DNA, 1072 bp, Homo sapiens
caggcaaggacaacctacctgtgactgtgactctgtcccgccaggaacacctccacccattgagtcattcacttttaaagaaaatcagctctgtagaaacacatgccaggagctgcataaacattccgtcgaacaggtacaatccatttcctctgtgaaattttctctgaaggaatgaaatgccttagtgaatgtaaacagcatgacttgcttgcgcattgggccttccacgtttaagaatggtttgacgtgtttctttgatatgatttcattgtaatcattaagttcattctggggaaattaaggttcattaaaatgtttcttttaaatatgggaggtcctattctctttgttatcagtgaaacagtttgcatttggagctttgctgctgttataagaggaaataaagacaatacgaagtagacattttgatgagtgggtaatgcaggcagacattatacataaagtgtagactaatgatgtgacttttgttttcacagactgaaacagcagagcttcctgcttctgatagcataaacccaggcaacctacaattggtttcagagttaaaggtcagaagaatattctcttccagtgtctcgtgtcttacatatgaaaactttaatgaactgaaaagaattcagtcatatagcttcttgttctttaatactattaaagatattggtaaacagattcagaaaaacagatttggattggttatttttcccaatatttacctctgtttatgttttgagctctcctcttaaagtttctatgccaacctattggcaagaacaacttaggctaagtaactgaacttcatgtctaaatctaagttagggagctgggcacggtggctcacccctataatctcagcactttgggaggctgaagcgggctgatcacttgaggtcagatgtttgaggccagcctggccaacatgatgaaaccccatctctactaaaaatacaaaaattagccgggcgtggtggtgggcgcctataatcccagctgctagggaggctgagggaagagaatacttgaactgggagacagacgttgcagtgagcca

SEQ ID NO: 438 - DNA, 1162 bp, Homo sapiens
tgtaaccccagcactttgggaggccgaggtgggtggatcacttgaggtcaggagttcaagaccagcctggccaaatggtgaaaccttgtctctactaaaaatacaaaaattagctgggtgtggtggcgggcgcctgtaatcctagctactcggaaggctgaggcaggagaatcgcttgaacccgggaggcgaaggttgcagtaagccgagattgcaccactgcactccagcctgggtgataaagtgagactcagtcccaaaaacacccaaaaattaaaattaataaaataaataaaaaataaaatctttcatgatgtaagtttgataggcatttttttaggtacataagaaccacaaagctctttcttttcacctgcataagacttaaattttacatacctactgtttcattgaattataattcatcactttgcatacttatgctttgcataaaacagcactcgagtgccactttaacagaactgttgccattgtgtcagaatccttcaggttcctgttccgtagatgtgagtgccatgttttgggaaagagccggttgtaaagagccatgtatcataactgcttgcgaagatgtagtttctctttggaaagctctggatgcttggcagtgggaaaaactttatacctggcacttcgcagaggtaagtgggaatctcgagctgaaagagatctttgcagccatttgcctgataatgtagatgggcagcttaccaaaattgggagctatgaccatgcaaggcagaacagagatgaggtttttttcccaacattttattatgaaaagtttcaaacatccagaaaagttgtatagtgagcacccatatacccaccattctagactctaccattaacatcctgctttgttcgctttatcacaaatttttgtttgtttgtttgagacagggtctcactctgtcatgcaggctggagtgcagtggcatgatcacggctcactgcagtttcaacctccccaggctcagtaatcctctcacctcaccctcccaagtagctgggaccacaggcatgcaccaccatgtctggctaattttttattgtatttttttcttcttctttttattgagatggagtcctgctctgtcacccaggctggagtgcagtggcatgatctcggctcactgtc

SEQ ID NO: 439 - DNA, 1086 bp, Homo sapiens
ttgcaatgagctgagattgtgccattgcactcaaggctgggcaacaagagtgaaactccgactcaaaaaaaaaaatttccttgttcctgtagagtcttcatacttgaatatacctcattcttgctctccaaatatatacaacatctaacactgtgctttacacagaggtgcccaataaatatttgttcagtgaacatagatatacttttaaatggctgcataaatattctttacattcacatgccaaaatatacccaattattcccctattgttagaattataccttgcattaggtaaatgctcagtaagcactattatgctattatgcatatagtttatttagatttacagctaataaaaagagttttctgagccttcaaatgatgaaaattatccttgtacagtgagaatacaaaagaatgtgataaattttggaaaatctggattaaacaaaaatgaaacaaccaagcataatttttggctgctttgttttatttaggttccagtattacagatagttccagtgcctgatgtgtataatctcgtgtgtgtagctttgggaaatttggaaatcagagagatcaggtatgtaattcccaaggagtgatttgtttttccttcatctttgtctctgtcagctggttttaagtgcaggtaataacctaggcttgagtcttgaaagaatctgaaagatctaaagagagagagatttgtttaaaaaaaaatcaatagaatgacatccctgactgaagtttctatttaaaatgtgaacctaggctgggcgcagtggctcacgcctgtaatcccagcactttgggaggccaaggaaggtggatcaactgaggtcaggagtttgagaccagcctggccaacatggtgaaactgtgtctctactgaaaatacaaaaattagcctggtgtatagcacctgcgggtgcctataatcccagctactcaggaggctgaggcaggagaattgcctgaacccgggaaacagaggttgcagtgagctaagatcgtgccaccactgcattccttctggatgacagagtgagactttgtctcaaaaaaaaaaaaaaaaaaaaa

SEQ ID NO: 440 - DNA, 1162 bp, Homo sapiens
gaggcaggagaattgcctgaacccgggaaacagaggttgcagtgagctaagatcgtgccaccactgcattccttctggatgacagagtgagactttgtctcaaaaaaaaaaaaaaaaaaaaaaaaaaaaggccgggtatggtggctcacacctgtaatcccagcactttgggaggccgaggcaggtggatcacgaggtcaggagttcgagaccagcctgaccaacatggtgaaaccccgtctctacaaaaatacagaaaaattagccaggtgtggtggtgcgcacctataatcccagctactcaggaggctgaggcaggacagtcgcttgaacctgggaggcagagttgcagtgagccaagattgtgccactgcactccagcctaggcgacagagcaagactctgtctcaaaaaaaaaaaaaaaaaaaaagtgaacctagtcctttaatattaaaaggttactcctcacatcaccccatttttccttatatttggcttagggcattgttttgttcctctgatgatgaaagtgaaaagcaagtactactgaagtctggaaatataaaagctgtgcttggcctgacaaagaggaggctagttagtagcagtgggaccctttctgatcaacaagtagaagtcatgacgtttgcagaagatggagggtaagaaaagcattgattgatttttaactattagatgaagaatgattttatcacaggtttcagagaaagttgggtaactaggatctcgtttttctgtgctgggggtgtaatataagcatgtaccgcatcaacactaggttatgacatagaagcaggttagtgaggtggaagccagacatgtcagggatgaagtcaaagaaggtgagaggctcagcaaatgtagtttgttcttcagtcttcttgaaatctgtgtgtcccttaaatgttagaaatacctctgctgggcacagtggctcatgcccataatcccagccctttgggaggccaaggcagaagtttgagcccaggagttcaagaccagttggggccacatagcagggccccatctttacaaaaaatttaaaaattagctgggtgtggcagagcatgccttgtggtcccagctactagggagtctgaggtggaaggatcacttgagctcaggagttcaagggtgcagt

SEQ ID NO: 441 - DNA, 1117 bp, Homo sapiens
gcagacagatttctgagagatgagaagataaaattactgggacttggtgattgactagattgagaggaaggagagaatatcaacatggtagggttggtcacttgagtggtgaccaagctcgaaatgtgggtattatccttgtctccttccccccagtctaggtggtcacttgagtggtgaccaaccctgaaacttggacattagatggtgatgcaattcattgagataggaatgcagaaagaaacaaaaggtttatagaaaaagttaacaagtttaattttgaatataatgaattcgaggtgcttgcagcatatctaggtagatattatgaaagtaatatatgttcattgtagaaagtttagtatacacgttttctgggttagatttttttttcctgatattaggttagtttatattatgcagttcaacaatgcggagaagggctacctagagactgctttagtgcaaagtactgacttttcatactgttttaattacagaggcaaagaaaaccaatttttgatgccccctgaggagactatactaacttttgctgaggtccaagggatgcaagaagctctgcttggtactactattatgaacaacattgttatttggtaagctttccctctaggtcctcagttccctcatctgtagtatgaggatatacctctaattttacagggttgttgtgaagattaaataagagagtatgtgtaaacatgattgtggttttgtgttgctgttgttgttgtttttgttgtgttttgagacagagtctcctcctatcacccaggtgggagtacagtggtatgatctcggctcactgcaacctctgcctcctggattcaagtgattctcctgcctcagcctcccgagtagctgggattataggcatgtgccaccacacccagctaatttttgtattttttagtagagatagggtttcatcatgttggccaggttggtcttgaactcctggcctcaagtgatccacctgcctcagactcccaaaatgcagggattacaggagtgagccaccgtgcctggctaatttttgtattttttagtagagaagggattttgccatgttggctaggttggtcttgaactcctg

SEQ ID NO: 442 - DNA, 1088 bp, Homo sapiens
ctcttcctaccccacttcaatccttccttctatccattattttggtctagttgtagtataaatacatgtaatagagatataattgtaactctcttttaggtgtagtctcttgccctacaaaatttggtttcctggccgttgtcttccatggaaaatttagacataacaagaagtgtcacaaaatcatgatactgctataccatgtgcctgatttcaataccaggttgaatgagatgatggaaccttcctcatggaatttggagagatttatccctaggggcattgtagatttaatctaaggctgaactatcaaatgaaactattggcaaaattaacccacagttctacttttacctaaatctatgactaaagaaaactaaggagctcttagttttttccctggtcacctcctaagacatgctatgatgaataagaaaatattttctgaatactggtttgttggaagaatgtgatcagcttatttatttttgttatctaaggaatttaaaaactggtcaactcctgaaaaagatgcacattgatgattcttaccaagcttcagtctgtcacaaagcctattctgaaatggtaagtaatgactggctgggaccactttgtgtgttactgttggtctcattaagtgagagcagtaagtcataagcagtaatgaacaaaccttccccgtggcatcttttttcaaaattggatagcaatgtttgtcctttcttgaaatttaggatgaaaataagtgttggtacagtgattgcttggtaaattttctggctgtaggacctgagggcaaatatttatttctagctgtggatttgaactgagaactattatgcctgttatcagacttgactcccagccacattgccatgtttaagtagccttaggaaggatgattaaatgatccaataatcccagaaatacttttttttttttttgggatggagttttgctcttgttgcccaggctggagtgcaatggcgcgatctcagctcactgcaacctctgccttctaggttcaattaattgtcctgcctcagtcttccaagtagctgggattacaggtgcccgccaccaca

SEQ ID NO: 443 - DNA, 1149 bp, Homo sapiens
tgtcctcattctctctttgccaatatttccccaaatgaatggcatgaaatgtagtactatctaaggggaaggaaatggatgaatcagattcatgcctggcaagactggctaaaacaaacactgggaaccggaagcaggagaagctaaagctagaagttggctgagcgcggtggctgacgtctgtaatcccaacactttgggaggctgaggtgggaggatcccttgaggccaggtgttcaacaacagcctgggtaacacaggaaggccttgtctctaaaaaaaaaaagaagaagaacaagaagccagaagtccagtccagtaataatctcaacagttcctagacggcagggaaaaaaatcaagccagtggttaaatcctggatacttcagagcctatcggtcattgctttaattgtttggtttttgtctctgccagatctttatttttcctgacatactcttgacagtctatttgggatatttatttttctccgaaattaggggcttctctttattgtcctgagtcatccctgtgccaaagagagtgagtcgttgcgaagccctgtgtttcagctcattgtgattaaccctaagacgactctcagcgtgggtgtgatgctgtactgtcttcctccagggcaggctggcaggcaagtgtgcataactgctactctatgggtgggacattctgaaaggcactgtgcaaacacaaaaactagatatttttgtgtcacttagaagaatggaaaacatgaaatactatatatcatgataggaatattcagaagtaggatgaagattagtggacttgagtcaaaccccagattccctgcatcctgatctctactagtatggggttatataggtttttaatagtgtttattcaagccctgttttttcccctaaggtaaatattttggcagcacatggtggatcatgcctgtaatcccagcactttgggaggtcaaggtgggaggagagcttgagcccaggagtttgagaccaacttggacaacagagcaagacccagtctctaccaaaaaaaatatatatatatattagccaaacatgctggcatgcatctgtacttccagctactcgggaggctgaggtgggaggatggcttgaacctgggaggtggaggctgcag

SEQ ID NO: 444 - DNA, 1508 bp, Homo sapiens
aatagtgaaaagtgcaatgaagataaaaacatatatgtcataaagatggaacagatcccgtatgtgtgtgcacactgcctgagatagaggattaggggtgacctttctatggacataacaggcctgaatgatgacaagaactcagccatgctaagagctggggtgagagcctgtcagggagaaagaatggcaagagcagtgacactgagttgggactgagtttggccagagtgatggagagtggaaggaaggccactgtgcgccagccttcaattgctacaagatgcatcagagagattggcaggaactggacatgtgattctgtccaaaactgcaacacaatagccaacagacctctaaggctacaaatgtaggcattcatagttacagggatttttgttcctgttgctggttttgggaacatggttttgaccttttttttttttttaattgttttttggatatgtaatctgaattatatcttctttgtatgctatcaggttcctggaaggtgacgtgaaagatcactgtgcagcagcaatcttgacttctggaacaattgccatttgggacttacttctcggtcagtgtactgccctcctcccacctgtctctgaccaacattggtcttttgtgaaatggtcgggtacagactctcatttgctggctggacaaaaagatggaaatatatttgtataccactattcataagttagggtaaagtgaaaacacaattttctggatatattgggcctcttagtattttttggagttttaaatataaaggagaatatctgaatgacacttaaaatgattgcttgtttatgtccagacagacttattttttattctaatgatggtagcaccactgatcttggatgtacatttatgtatactttgagaaaaagggttttaggttgatttttgtaatttcccacatttgtacatgtgcttttaaaggtgtacataaagcttcaaatggcaataaatatttatttttatacattctgcttggcatgttattgtttcccattctttcaagatcatttgcagaagcaagaactaattattatacaaccaggatatttaatcaatagtctttgcctagtaagtgtaaatttcagttcagttaacttactacactaatatgcaatatactttttgtgctatttgtaatactttatttttacatacatactaaaataaaatgaaacctactaaaatatcctaatttagggatactcttactctttttcattctcatgcatctttcatgccagtgctgcattatcactagagtcacctttttttgagatggagcctcactggtcacccaggcgggagtgcagtggcatgatctcggctcattgcaacctctgcctcccaggttaagtgattcccctgcttcagcctctcaagtagctgggattacaggcacccaccaccacacctggctaatttttgtattttaatagagatgggggtctcaccatgttggtcaggcaggc

SEQ ID NO: 445 - DNA, 1500 bp, Homo sapiens
aaggtgacgtgaaagatcactgtgcagcagcaatcttgacttctggaacaattgccatttgggacttacttctcggtcagtgtactgccctcctcccacctgtctctgaccaacattggtcttttgtgaaatggtcgggtacagactctcatttgctggctggacaaaaagatggaaatatatttgtataccactattcataagttagggtaaagtgaaaacacaattttctggatatattgggcctcttagtattttttggagttttaaatataaaggagaatatctgaatgacacttaaaatgattgcttgtttatgtccagacagacttattttttattctaatgatggtagcaccactgatcttggatgtacatttatgtatactttgagaaaaagggttttaggttgatttttgtaatttcccacatttgtacatgtgcttttaaaggtgtacataaagcttcaaatggcaataaatatttatttttatacattctgcttggcatgttattgtttcccattctttcaagatcatttgcagaagcaagaactaattattatacaaccaggatatttaatcaatagtctttgcctagtaagtgtaaatttcagttcagttaacttactacactaatatgcaatatactttttgtgctatttgtaatactttatttttacatacatactaaaataaaatgaaacctactaaaatatcctaatttagggatactcttactctttttcattctcatgcatctttcatgccagtgctgcattatcactagagtcacctttttttgagatggagcctcactggtcacccaggcgggagtgcagtggcatgatctcggctcattgcaacctctgcctcccaggttaagtgattcccctgcttcagcctctcaagtagctgggattacaggcacccaccaccacacctggctaatttttgtattttaatagagatgggggtctcaccatgttggtcaggcaggccttgaactcctgacctcaagtgatccacctgctttgacctcccaaagtgctgggattacaggcatgaaccactgccgctcttttttttcttggttttttgttttttgttttttttttagaacggagtctccctctatcacccaggctagagtgcagtggggtgatctgggctcactgcaacctccgcctcccaggttcaagtgattctcatgcctcagcctcctgagtagctgggattacaggcatgctctactatacccggctaatttttatattgtttgtagagacagggtttcactgtgttggccaggctagtctggaactcctgaccttaggtgatctgcctacgtcggcctcccaaagtactgggattacagggatgagctaccgtgcccagccaaagaagattatattttttaaagacaaatttttgggccgggcgcagtggatcacgcctgtaatcccagcactttgggaggccaaggtgggcagatcactag

SEQ ID NO: 446 - DNA, 3724 bp, Homo sapiens
tctccctcggcgccgccgccgccgcccgcggggctgggacccgatgcggttagagccgcggagcctggaagagccccgagcgtttctgctttgggacaaccatacatctaattccttaaagtagttttatatgtaaaacttgcaaagaatcagaacaatgcctccacgaccatcatcaggtgaactgtggggcatccacttgatgcccccaagaatcctagtagaatgtttactaccaaatggaatgatagtgactttagaatgcctccgtgaggctacattaataaccataaagcatgaactatttaaagaagcaagaaaataccccctccatcaacttcttcaagatgaatcttcttacattttcgtaagtgttactcaagaagcagaaagggaagaattttttgatgaaacaagacgactttgtgaccttcggctttttcaaccctttttaaaagtaattgaaccagtaggcaaccgtgaagaaaagatcctcaatcgagaaattggttttgctatcggcatgccagtgtgtgaatttgatatggttaaagatccagaagtacaggacttccgaagaaatattctgaacgtttgtaaagaagctgtggatcttagggacctcaattcacctcatagtagagcaatgtatgtctatcctccaaatgtagaatcttcaccagaattgccaaagcacatatataataaattagataaagggcaaataatagtggtgatctgggtaatagtttctccaaataatgacaagcagaagtatactctgaaaatcaaccatgactgtgtaccagaacaagtaattgctgaagcaatcaggaaaaaaactcgaagtatgttgctatcctctgaacaactaaaactctgtgttttagaatatcagggcaagtatattttaaaagtgtgtggatgtgatgaatacttcctagaaaaatatcctctgagtcagtataagtatataagaagctgtataatgcttgggaggatgcccaatttgatgttgatggctaaagaaagcctttattctcaactgccaatggactgttttacaatgccatcttattccagacgcatttccacagctacaccatatatgaatggagaaacatctacaaaatccctttgggttataaatagtgcactcagaataaaaattctttgtgcaacctacgtgaatgtaaatattcgagacattgataagatctatgttcgaacaggtatctaccatggaggagaacccttatgtgacaatgtgaacactcaaagagtaccttgttccaatcccaggtggaatgaatggctgaattatgatatatacattcctgatcttcctcgtgctgctcgactttgcctttccatttgctctgttaaaggccgaaagggtgctaaagaggaacactgtccattggcatggggaaatataaacttgtttgattacacagacactctagtatctggaaaaatggctttgaatctttggccagtacctcatggattagaagatttgctgaaccctattggtgttactggatcaaatccaaataaagaaactccatgcttagagttggagtttgactggttcagcagtgtggtaaagttcccagatatgtcagtgattgaagagcatgccaattggtctgtatcccgagaagcaggatttagctattcccacgcaggactgagtaacagactagctagagacaatgaattaagggaaaatgacaaagaacagctcaaagcaatttctacacgagatcctctctctgaaatcactgagcaggagaaagattttctatggagtcacagacactattgtgtaactatccccgaaattctacccaaattgcttctgtctgttaaatggaattctagagatgaagtagcccagatgtattgcttggtaaaagattggcctccaatcaaacctgaacaggctatggaacttctggactgtaattacccagatcctatggttcgaggttttgctgttcggtgcttggaaaaatatttaacagatgacaaactttctcagtatttaattcagctagtacaggtcctaaaatatgaacaatatttggataacttgcttgtgagatttttactgaagaaagcattgactaatcaaaggattgggcactttttcttttggcatttaaaatctgagatgcacaataaaacagttagccagaggtttggcctgcttttggagtcctattgtcgtgcatgtgggatgtatttgaagcacctgaataggcaagtcgaggcaatggaaaagctcattaacttaactgacattctcaaacaggagaagaaggatgaaacacaaaaggtacagatgaagtttttagttgagcaaatgaggcgaccagatttcatggatgctctacagggctttctgtctcctctaaaccctgctcatcaactaggaaacctcaggcttgaagagtgtcgaattatgtcctctgcaaaaaggccactgtggttgaattgggagaacccagacatcatgtcagagttactgtttcagaacaatgagatcatctttaaaaatggggatgatttacggcaagatatgctaacacttcaaattattcgtattatggaaaatatctggcaaaatcaaggtcttgatcttcgaatgttaccttatggttgtctgtcaatcggtgactgtgtgggacttattgaggtggtgcgaaattctcacactattatgcaaattcagtgcaaaggcggcttgaaaggtgcactgcagttcaacagccacacactacatcagtggctcaaagacaagaacaaaggagaaatatatgatgcagccattgacctgtttacacgttcatgtgctggatactgtgtagctaccttcattttgggaattggagatcgtcacaatagtaacatcatggtgaaagacgatggacaactgtttcatatagattttggacactttttggatcacaagaagaaaaaatttggttataaacgagaacgtgtgccatttgttttgacacaggatttcttaatagtgattagtaaaggagcccaagaatgcacaaagacaagagaatttgagaggtttcaggagatgtgttacaaggcttatctagctattcgacagcatgccaatctcttcataaatcttttctcaatgatgcttggctctggaatgccagaactacaatcttttgatgacattgcatacattcgaaagaccctagccttagataaaactgagcaagaggctttggagtatttcatgaaacaaatgaatgatgcacatcatggtggctggacaacaaaaatggattggatcttccacacaattaaacagcatgcattgaactgaaaagataactgagaaaatgaaagctcactctggattccacactgcactgttaataactctcagcaggcaaagaccgattgcataggaattgcacaatccatgaacagcattagaatttacagcaagaacagaaataaaatactatataatttaaataatgtaaacgcaaacagggtttgatagcacttaaactagttcatttcaaaattaagctttagaataatgcgcaatttcatgttatgccttaagtccaaaaaggtaaactttgaagattgtttgtatctttttttaaaaaacaaaacaaaacaaaaatccccaaaatatatagaaatgatggagaaggaaaaaaaaaaaaaaaaa

SEQ ID NO: 447 - DNA, 3538 bp, Homo sapiens
ggcaagacaacgaggatttgcgtagggggcgagcctctgaggccacttggctcttacggccacgcagggcgccgcagatgcagccggagcccgcttttccctctcaggacgacccctaggccgccagcagttccctaccgacgaaggcgactgtacagcgtccaccgcgttcgtgcccacttacccgccgccccactccgggccgccggctcgcagcaggaccagcccggctgctacggccgcggatacacgccctcaggcccggcgctgcgcagcttgcggaagctttcccggacagactcgctgccagcggattggctgcgagcagcgccaatctcacgttgcccccgggcgaggcgggactcagtgccgcgctctctgcacccgctctgccgcgcgcgtgcgtgctgggtgcgggtgcgggtgcggggttgggcctgcgcatcgggtgagacgctggctgcttgcggctagtggatggtaattgcctgcctcgcgctagcaggaagctgctctgttaaaagcgaaaatgaaacaattgcctgcggcaacagttcgactcctttcaagttctcagatcatcacttcggtggtcagtgttgtaaaagagcttattgaaaactccttggatgctggtgccacaagcgtagatgttaaactggagaactatggatttgataaaattgaggtgcgagataacggggagggtatcaaggctgttgatgcacctgtaatggcaatgaagtactacacctcaaaaataaatagtcatgaagatcttgaaaatttgacaacttacggttttcgtggagaagccttggggtcaatttgttgtatagctgaggttttaattacaacaagaacggctgctgataattttagcacccagtatgttttagatggcagtggccacatactttctcagaaaccttcacatcttggtcaaggtacaactgtaactgctttaagattatttaagaatctacctgtaagaaagcagttttactcaactgcaaaaaaatgtaaagatgaaataaaaaagatccaagatctcctcatgagctttggtatccttaaacctgacttaaggattgtctttgtacataacaaggcagttatttggcagaaaagcagagtatcagatcacaagatggctctcatgtcagttctggggactgctgttatgaacaatatggaatcctttcagtaccactctgaagaatctcagatttatctcagtggatttcttccaaagtgtgatgcagaccactctttcactagtctttcaacaccagaaagaagtttcatcttcataaacagtcgaccagtacatcaaaaagatatcttaaagttaatccgacatcattacaatctgaaatgcctaaaggaatctactcgtttgtatcctgttttctttctgaaaatcgatgttcctacagctgatgttgatgtaaatttaacaccagataaaagccaagtattattacaaaataaggaatctgttttaattgctcttgaaaatctgatgacgacttgttatggaccattacctagtacaaattcttatgaaaataataaaacagatgtttccgcagctgacatcgttcttagtaaaacagcagaaacagatgtgctttttaataaagtggaatcatctggaaagaattattcaaatgttgatacttcagtcattccattccaaaatgatatgcataatgatgaatctggaaaaaacactgatgattgtttaaatcaccagataagtattggtgactttggttatggtcattgtagtagtgaaatttctaacattgataaaaacactaagaatgcatttcaggacatttcaatgagtaatgtatcatgggagaactctcagacggaatatagtaaaacttgttttataagttccgttaagcacacccagtcagaaaatggcaataaagaccatatagatgagagtggggaaaatgaggaagaagcaggtcttgaaaactcttcggaaatttctgcagatgagtggagcaggggaaatatacttaaaaattcagtgggagagaatattgaacctgtgaaaattttagtgcctgaaaaaagtttaccatgtaaagtaagtaataataattatccaatccctgaacaaatgaatcttaatgaagattcatgtaacaaaaaatcaaatgtaatagataataaatctggaaaagttacagcttatgatttacttagcaatcgagtaatcaagaaacccatgtcagcaagtgctctttttgttcaagatcatcgtcctcagtttctcatagaaaatcctaagactagtttagaggatgcaacactacaaattgaagaactgtggaagacattgagtgaagaggaaaaactgaaatatgaagagaaggctactaaagacttggaacgatacaatagtcaaatgaagagagccattgaacaggagtcacaaatgtcactaaaagatggcagaaaaaagataaaacccaccagcgcatggaatttggcccagaagcacaagttaaaaacctcattatctaatcaaccaaaacttgatgaactccttcagtcccaaattgaaaaaagaaggagtcaaaatattaaaatggtacagatccccttttctatgaaaaacttaaaaataaattttaagaaacaaaacaaagttgacttagaagagaaggatgaaccttgcttgatccacaatctcaggtttcctgatgcatggctaatgacatccaaaacagaggtaatgttattaaatccatatagagtagaagaagccctgctatttaaaagacttcttgagaatcataaacttcctgcagagccactggaaaagccaattatgttaacagagagtctttttaatggatctcattatttagacgttttatataaaatgacagcagatgaccaaagatacagtggatcaacttacctgtctgatcctcgtcttacagcgaatggtttcaagataaaattgataccaggagtttcaattactgaaaattacttggaaatagaaggaatggctaattgtctcccattctatggagtagcagatttaaaagaaattcttaatgctatattaaacagaaatgcaaaggaagtttatgaatgtagacctcgcaaagtgataagttatttagagggagaagcagtgcgtctatccagacaattacccatgtacttatcaaaagaggacatccaagacattatctacagaatgaagcaccagtttggaaatgaaattaaagagtgtgttcatggtcgcccattttttcatcatttaacctatcttccagaaactacatgattaaatatgtttaagaagattagttaccattgaaattggttctgtcataaaacagcatgagtctggttttaaattatctttgtattatgtgtcacatggttattttttaaatgaggattcactgacttgtttttatattgaaaaaagttccacgtattgtagaaaacgtaaataaactaatatagactattcaaaaaaaaaaaaaaaaaa

SEQ ID NO: 448 - DNA, 3421 bp, Homo sapiens
ggcaagacaacgaggatttgcgtagggggcgagcctctgaggccacttggctcttacggccacgcagggcgccgcagatgcagccggagcccgcttttccctctcaggacgacccctaggccgccagcagttccctaccgacgaaggcgactgtacagcgtccaccgcgttcgtgcccacttacccgccgccccactccgggccgccggctcgcagcaggaccagcccggctgctacggccgcggatacacgccctcaggcccggcgctgcgcagcttgcggaagctttcccggacagactcgctgccagcggattggctgcgagcagcgccaatctcacgttgcccccgggcgaggcgggactcagtgccgcgctctctgcacccgctctgccgcgcgcgtgcgtgctgggtgcgggtgcgggtgcggggttgggcctgcgcatcgggtgagacgctggctgcttgcggctagtggatggtaattgcctgcctcgcgctagcaggaagctgctctgttaaaagcgaaaatgaaacaattgcctgcggcaacagttcgactcctttcaagttctcagatcatcacttcggtggtcagtgttgtaaaagagcttattgaaaactccttggatgctggtgccacaagcgtagatgttaaactggagaactatggatttgataaaattgaggtgcgagataacggggagggtatcaaggctgttgatgcacctgtaatggcaatgaagtactacacctcaaaaataaatagtcatgaagatcttgaaaatttgacaacttacggttttcgtggagaagccttggggtcaatttgttgtatagctgaggttttaattacaacaagaacggctgctgataattttagcacccagtatgttttagatggcagtggccacatactttctcagaaaccttcacatcttggtcaaggtacaactgtaactgctttaagattatttaagaatctacctgtaagaaagcagttttactcaactgcaaaaaaatgtaaagatgaaataaaaaagatccaagatctcctcatgagctttggtatccttaaacctgacttaaggattgtctttgtacataacaagatttatctcagtggatttcttccaaagtgtgatgcagaccactctttcactagtctttcaacaccagaaagaagtttcatcttcataaacagtcgaccagtacatcaaaaagatatcttaaagttaatccgacatcattacaatctgaaatgcctaaaggaatctactcgtttgtatcctgttttctttctgaaaatcgatgttcctacagctgatgttgatgtaaatttaacaccagataaaagccaagtattattacaaaataaggaatctgttttaattgctcttgaaaatctgatgacgacttgttatggaccattacctagtacaaattcttatgaaaataataaaacagatgtttccgcagctgacatcgttcttagtaaaacagcagaaacagatgtgctttttaataaagtggaatcatctggaaagaattattcaaatgttgatacttcagtcattccattccaaaatgatatgcataatgatgaatctggaaaaaacactgatgattgtttaaatcaccagataagtattggtgactttggttatggtcattgtagtagtgaaatttctaacattgataaaaacactaagaatgcatttcaggacatttcaatgagtaatgtatcatgggagaactctcagacggaatatagtaaaacttgttttataagttccgttaagcacacccagtcagaaaatggcaataaagaccatatagatgagagtggggaaaatgaggaagaagcaggtcttgaaaactcttcggaaatttctgcagatgagtggagcaggggaaatatacttaaaaattcagtgggagagaatattgaacctgtgaaaattttagtgcctgaaaaaagtttaccatgtaaagtaagtaataataattatccaatccctgaacaaatgaatcttaatgaagattcatgtaacaaaaaatcaaatgtaatagataataaatctggaaaagttacagcttatgatttacttagcaatcgagtaatcaagaaacccatgtcagcaagtgctctttttgttcaagatcatcgtcctcagtttctcatagaaaatcctaagactagtttagaggatgcaacactacaaattgaagaactgtggaagacattgagtgaagaggaaaaactgaaatatgaagagaaggctactaaagacttggaacgatacaatagtcaaatgaagagagccattgaacaggagtcacaaatgtcactaaaagatggcagaaaaaagataaaacccaccagcgcatggaatttggcccagaagcacaagttaaaaacctcattatctaatcaaccaaaacttgatgaactccttcagtcccaaattgaaaaaagaaggagtcaaaatattaaaatggtacagatccccttttctatgaaaaacttaaaaataaattttaagaaacaaaacaaagttgacttagaagagaaggatgaaccttgcttgatccacaatctcaggtttcctgatgcatggctaatgacatccaaaacagaggtaatgttattaaatccatatagagtagaagaagccctgctatttaaaagacttcttgagaatcataaacttcctgcagagccactggaaaagccaattatgttaacagagagtctttttaatggatctcattatttagacgttttatataaaatgacagcagatgaccaaagatacagtggatcaacttacctgtctgatcctcgtcttacagcgaatggtttcaagataaaattgataccaggagtttcaattactgaaaattacttggaaatagaaggaatggctaattgtctcccattctatggagtagcagatttaaaagaaattcttaatgctatattaaacagaaatgcaaaggaagtttatgaatgtagacctcgcaaagtgataagttatttagagggagaagcagtgcgtctatccagacaattacccatgtacttatcaaaagaggacatccaagacattatctacagaatgaagcaccagtttggaaatgaaattaaagagtgtgttcatggtcgcccattttttcatcatttaacctatcttccagaaactacatgattaaatatgtttaagaagattagttaccattgaaattggttctgtcataaaacagcatgagtctggttttaaattatctttgtattatgtgtcacatggttattttttaaatgaggattcactgacttgtttttatattgaaaaaagttccacgtattgtagaaaacgtaaataaactaatatagactattcaaaaaaaaaaaaaaaaaa

SEQ ID NO: 449 - DNA, 3052 bp, Homo sapiens
ggcaagacaacgaggatttgcgtagggggcgagcctctgaggccacttggctcttacggccacgcagggcgccgcagatgcagccggagcccgcttttccctctcaggacgacccctaggccgccagcagttccctaccgacgaaggcgactgtacagcgtccaccgcgttcgtgcccacttacccgccgccccactccgggccgccggctcgcagcaggaccagcccggctgctacggccgcggatacacgccctcaggcccggcgctgcgcagcttgcggaagctttcccggacagactcgctgccagcggattggctgcgagcagcgccaatctcacgttgcccccgggcgaggcgggactcagtgccgcgctctctgcacccgctctgccgcgcgcgtgcgtgctgggtgcgggtgcgggtgcggggttgggcctgcgcatcgggtgagacgctggctgcttgcggctagtggatggtaattgcctgcctcgcgctagcaggaagctgctctgttaaaagcgaaaatgaaacaattgcctgcggcaacagttcgactcctttcaagttctcagatcatcacttcggtggtcagtgttgtaaaagagcttattgaaaactccttggatgctggtgccacaagcgtagatgttaaactggagaactatggatttgataaaattgaggtgcgagataacggggagggtatcaaggctgttgatgcacctgtaatggcaatgaagtactacacctcaaaaataaatagtcatgaagatcttgaaaatttgacaacttacggttttcgtggagaagccttggggtcaatttgttgtatagctgaggttttaattacaacaagaacggctgctgataattttagcacccagtatgttttagatggcagtggccacatactttctcagaaaccttcacatcttggtcaaggtacaactgtaactgctttaagattatttaagaatctacctgtaagaaagcagttttactcaactgcaaaaaaatgtaaagatgaaataaaaaagatccaagatctcctcatgagctttggtatccttaaacctgacttaaggattgtctttgtacataacaaggcagttatttggcagaaaagcagagtatcagatcacaagatggctctcatgtcagttctggggactgctgttatgaacaatatggaatcctttcagtaccactctgaagaatctcagatttatctcagtggatttcttccaaagtgtgatgcagaccactctttcactagtctttcaacaccagaaagaagtttcatcttcataaacagtcgaccagtacatcaaaaagatatcttaaagttaatccgacatcattacaatctgaaatgcctaaaggaatctactcgtttgtatcctgttttctttctgaaaatcgatgttcctacagctgatgttgatgtaaatttaacaccagataaaagccaagtattattacaaaataaggaatctgttttaattgctcttgaaaatctgatgacgacttgttatggaccattacctagtacaaattcttatgaaaataataaaacagatgtttccgcagctgacatcgttcttagtaaaacagcagaaacagatgtgctttttaataaagtggaatcatctggaaagaattattcaaatgttgatacttcagtcattccattccaaaatgatatgcataatgatgaatctggaaaaaacactgatgattgtttaaatcaccagataagtattggtgactttggttatggtcattgtagtagtgaaatttctaacattgataaaaacactaagaatgcatttcaggacatttcaatgagtaatgtatcatgggagaactctcagacggaatatagtaaaacttgttttataagttccgttaagcacacccagtcagaaaatggcaataaagaccatatagatgagagtggggaaaatgaggaagaagcaggtcttgaaaactcttcggaaatttctgcagatgagtggagcaggggaaatatacttaaaaattcagtgggagagaatattgaacctgtgaaaattttagtgcctgaaaaaagtttaccatgtaaagtaagtaataataattatccaatccctgaacaaatgaatcttaatgaagattcatgtaacaaaaaatcaaatgtaatagataataaatctggaaaagttacagcttatgatttacttagcaatcgagtaatcaagaaacccatgtcagcaagtgctctttttgttcaagatcatcgtcctcagtttctcatagaaaatcctaagactagtttagaggatgcaacactacaaattgaagaactgtggaagacattgagtgaagaggaaaaactgaatctttttaatggatctcattatttagacgttttatataaaatgacagcagatgaccaaagatacagtggatcaacttacctgtctgatcctcgtcttacagcgaatggtttcaagataaaattgataccaggagtttcaattactgaaaattacttggaaatagaaggaatggctaattgtctcccattctatggagtagcagatttaaaagaaattcttaatgctatattaaacagaaatgcaaaggaagtttatgaatgtagacctcgcaaagtgataagttatttagagggagaagcagtgcgtctatccagacaattacccatgtacttatcaaaagaggacatccaagacattatctacagaatgaagcaccagtttggaaatgaaattaaagagtgtgttcatggtcgcccattttttcatcatttaacctatcttccagaaactacatgattaaatatgtttaagaagattagttaccattgaaattggttctgtcataaaacagcatgagtctggttttaaattatctttgtattatgtgtcacatggttattttttaaatgaggattcactgacttgtttttatattgaaaaaagttccacgtattgtagaaaacgtaaataaactaatatagactattcaaaaaaaaaaaaaaaaaa

SEQ ID NO: 450 - DNA, 2851 bp, Homo sapiens
agccaatgggagttcaggaggcggagcgcctgtgggagccctggagggaactttcccagtccccgaggcggatcgggtgttgcatccatggagcgagctgagagctcgagtacagaacctgctaaggccatcaaacctattgatcggaagtcagtccatcagatttgctctgggcaggtggtactgagtctaagcactgcggtaaaggagttagtagaaaacagtctggatgctggtgccactaatattgatctaaagcttaaggactatggagtggatcttattgaagtttcagacaatggatgtggggtagaagaagaaaacttcgaaggcttaactctgaaacatcacacatctaagattcaagagtttgccgacctaactcaggttgaaacttttggctttcggggggaagctctgagctcactttgtgcactgagcgatgtcaccatttctacctgccacgcatcggcgaaggttggaactcgactgatgtttgatcacaatgggaaaattatccagaaaaccccctacccccgccccagagggaccacagtcagcgtgcagcagttattttccacactacctgtgcgccataaggaatttcaaaggaatattaagaaggagtatgccaaaatggtccaggtcttacatgcatactgtatcatttcagcaggcatccgtgtaagttgcaccaatcagcttggacaaggaaaacgacagcctgtggtatgcacaggtggaagccccagcataaaggaaaatatcggctctgtgtttgggcagaagcagttgcaaagcctcattccttttgttcagctgccccctagtgactccgtgtgtgaagagtacggtttgagctgttccgatgctctgcataatcttttttacatctcaggtttcatttcacaatgcacgcatggagttggaaggagttcaacagacagacagtttttctttatcaaccggcggccttgtgacccagcaaaggtctgcagactcgtgaatgaggtctaccacatgtataatcgacaccagtatccatttgttgttcttaacatttctgttgattcagaatgcgttgatatcaatgttactccagataaaaggcaaattttgctacaagaggaaaagcttttgttggcagttttaaagacctctttgataggaatgtttgatagtgatgtcaacaagctaaatgtcagtcagcagccactgctggatgttgaaggtaacttaataaaaatgcatgcagcggatttggaaaagcccatggtagaaaagcaggatcaatccccttcattaaggactggagaagaaaaaaaagacgtgtccatttccagactgcgagaggccttttctcttcgtcacacaacagagaacaagcctcacagcccaaagactccagaaccaagaaggagccctctaggacagaaaaggggtatgctgtcttctagcacttcaggtgccatctctgacaaaggcgtcctgagacctcagaaagaggcagtgagttccagtcacggacccagtgaccctacggacagagcggaggtggagaaggactcggggcacggcagcacttccgtggattctgaggggttcagcatcccagacacgggcagtcactgcagcagcgagtatgcggccagctccccaggggacaggggctcgcaggaacatgtggactctcaggagaaagcgcctgaaactgacgactctttttcagatgtggactgccattcaaaccaggaagataccggatgtaaatttcgagttttgcctcagccaactaatctcgcaaccccaaacacaaagcgttttaaaaaagaagaaattctttccagttctgacatttgtcaaaagttagtaaatactcaggacatgtcagcctctcaggttgatgtagctgtgaaaattaataagaaagttgtgcccctggacttttctatgagttctttagctaaacgaataaagcagttacatcatgaagcacagcaaagtgaaggggaacagaattacaggaagtttagggcaaagatttgtcctggagaaaatcaagcagccgaagatgaactaagaaaagagataagtaaaacgatgtttgcagaaatggaaatcattggtcagtttaacctgggatttataataaccaaactgaatgaggatatcttcatagtggaccagcatgccacggacgagaagtataacttcgagatgctgcagcagcacaccgtgctccaggggcagaggctcatagcacctcagactctcaacttaactgctgttaatgaagctgttctgatagaaaatctggaaatatttagaaagaatggctttgattttgttatcgatgaaaatgctccagtcactgaaagggctaaactgatttccttgccaactagtaaaaactggaccttcggaccccaggacgtcgatgaactgatcttcatgctgagcgacagccctggggtcatgtgccggccttcccgagtcaagcagatgtttgcctccagagcctgccggaagtcggtgatgattgggactgctcttaacacaagcgagatgaagaaactgatcacccacatgggggagatggaccacccctggaactgtccccatggaaggccaaccatgagacacatcgccaacctgggtgtcatttctcagaactgaccgtagtcactgtatggaataattggttttatcgcagatttttatgttttgaaagacagagtcttcactaaccttttttgttttaaaatgaacctgctacttaaaaaaaatacacatcacacccatttaaaagtgatcttgagaaccttttcaaaccagaaaaaaaaaaaaaaaa

SEQ ID NO: 451 - DNA, 1500 bp, Homo sapiens
gttgctgagagtggtctcaaactcttgggattcaattgatcctcccgcctcagtctcccaaagcgctgagactccaggcgtgaaccaccgcgcccgacctggaaagatacatacatatatatatatatatattttttttttttttttttttttttttgagatagagtttagctcttgttgcccaggctcgagtgcaatggctcgatctcagctcactgcaaactccgcctccagggttcaaacgattctcctgcctcagcctcccgagtagctgggattacaggcgcctcaccacacccggccaatttctgtatttttagtagagacgaggttttaccatgttggccaggctagtctcgaactcctgacctcaggtgatccgcccgcctcggcctcccaaagtgctgggattacaggcgtgagccacggcgcccggcctggataaatcttttaaaacataaaagtctgagtgagtccctggccggccggcacagatgccggggtggggccgtgaaccggttgggacgcgctcgctccggcctggggggacccgggccagcagccggtcgccgcgcgtgcgcactgggcggggggccccgcgctcctacctgcacgtggccagcgcccggcgctgggccgtagctcctgccgtgcacgttggggagccggtacatgcaggtgggaagctccacacggagaggcgcgccgcccccgtgatagggctttacctggtacatcggcatggcagaaccaaagcaaaagggggtagcgcgtgccaaaggccaacgctcagaaaccgtcagaggtcacgacggagaccggccacctcccttctgaccctgctgcgggcgttcgggaaaacgcagtccggtgtgctctgattggcccaggctctttgacgtcacgaagtcgacctttgacagagccaataggcgaaaaggagagacgggaagtatttttgccgccccgcccggaaagggtggagcacaacgtcgaaagcagccaatgggagttcaggaggcggagcgcctgtgggagccctggagggaactttcccagtccccgaggcggatcgggtgttgcatccatggagcgagctgagagctcgaggtgagcggggctcgcagtcttccggtgtcccctctcgcgcgccctctttgagacccacggcattccaacctccctggaaatggggggaacatggccgaggcgcgtggcgaggcagccccctggaggccccggagtggcgacctcagtgttgcagcgatctcgtgccccttgggtgcgccttgaggccgaggcaagctccttcggggtcctgggctgcgggcaaaggattcggccctgtgaggagttgggttcggcctgtcccagacaggccttgcccacatcccatcacagggccgtggacttgaagcgggagcgtgaaatccccatagactgaatgcatttcctttctacctgttctctctccccttttatttttatttttatagtatt

SEQ ID NO: 452 - DNA, 1110 bp, Homo sapiens
gggtggggccgtgaaccggttgggacgcgctcgctccggcctggggggacccgggccagcagccggtcgccgcgcgtgcgcactgggcggggggccccgcgctcctacctgcacgtggccagcgcccggcgctgggccgtagctcctgccgtgcacgttggggagccggtacatgcaggtgggaagctccacacggagaggcgcgccgcccccgtgatagggctttacctggtacatcggcatggcagaaccaaagcaaaagggggtagcgcgtgccaaaggccaacgctcagaaaccgtcagaggtcacgacggagaccggccacctcccttctgaccctgctgcgggcgttcgggaaaacgcagtccggtgtgctctgattggcccaggctctttgacgtcacgaagtcgacctttgacagagccaataggcgaaaaggagagacgggaagtatttttgccgccccgcccggaaagggtggagcacaacgtcgaaagcagccaatgggagttcaggaggcggagcgcctgtgggagccctggagggaactttcccagtccccgaggcggatcgggtgttgcatccatggagcgagctgagagctcgaggtgagcggggctcgcagtcttccggtgtcccctctcgcgcgccctctttgagacccacggcattccaacctccctggaaatggggggaacatggccgaggcgcgtggcgaggcagccccctggaggccccggagtggcgacctcagtgttgcagcgatctcgtgccccttgggtgcgccttgaggccgaggcaagctccttcggggtcctgggctgcgggcaaaggattcggccctgtgaggagttgggttcggcctgtcccagacaggccttgcccacatcccatcacagggccgtggacttgaagcgggagcgtgaaatccccatagactgaatgcatttcctttctacctgttctctctccccttttatttttatttttatagtattttatttttaatttttttttgtagagacggggatttcgctgcgttgcccaggctggtctcgaacgcctgagctcaagcaatccgcccgccttggcccctcaaagtgctgga

SEQ ID NO: 453 - DNA, 1140 bp, Homo sapiens
acaggtgcccaccaccatgcctggctaattttttgtatttttagtaaagacggggtttcaccgtgttggccaggctggtgtcgaactcctgacctcaagttatccacccatctctgcttcccaaagtgctgggattacaggcatgagccaccacagccagccatgctttcacttttcaagaaagaagacaccattgttgccaaagattttggtaatttgagagatacaatgtatgttttctccatgtggatcttagtataattagatagtaaggatctgttgaatttgaagtatctatccagaagtattttgggtacatgtttaaggattgtaaaacagtgtttctatttctggatataataaatgtatttgctaatataataaatgaatagattagacccataaattatttacagtgttgagtcatttcccacagttaaaatcaggatgaaaatatatagctgaatacttgatttgtttcttgtaactgatttctctagtacagaacctgctaaggccatcaaacctattgatcggaagtcagtccatcagatttgctctgggcaggtggtactgagtctaagcactgcggtaaaggagttagtagaaaacagtctggatgctggtgccactaatattggtaagtttgggagagttttaagccacaagaaatgatctgtgaatgttgttgtagttaagaaacatttgttattgaaataagactatcaagtgttgatgtagtaataaattattatttttaagttgaagttagcacctattatgtgcctagtacttagctaggtagtaataataataacagcttttattgtgttcttacggtgtgccaggcaggtgttatgctaagaattgcacagaaatatttaatttgcagaacagctgggcgtggtgtctcacgcctataatcctagccctttgagaggccgaggtgggggaattgcttgaggccaagagttcaagaccaacctggccaacatggtgagaccttgtctctattgaaaaataaagtaggccaggcatagtggctcacgcctgtaatcccagcactttgggaggccaaggcgggtggatacctgaggtcaggagttcgagaccagcctgtccaaagtggtgaaactctgt

SEQ ID NO: 454 - DNA, 1087 bp, Homo sapiens
tttttagtagagacagggtttctccatgttggtcaggctggtctcgaactcctgacctcaggtgatctgctcgctttggcctcccaaagtgctggaattacaggcatgaaccactgcacccggtccccgttctctttattgggtatgttaaaattatttctttcaaaagaaaaggatggtcaaagtgcaacgcggtttacagctaattgatcaccaccagttacagattttttttgttccttctccactccaactgcttcacttcactagcctagggaaaaaaaaagaggaaagaaagaaaaagctaaactatttagtctgggctagtaaatagccagaaaggactttataacaatgaaatatacaaaatgacactagtatgtttaactaaaggtatagttatgactcttaaatttgcatatgttataaataatgtcaatataaaaactgatagcatgggtccgtttttaataaatatgtaaatattttaaactttctagatctaaagcttaaggactatggagtggatcttattgaagtttcagacaatggatgtggggtagaagaagaaaacttcgaaggcttaagtaagttgactttttctaatcctattataaaataattgggtcacatgtctcagaattttgagtaacactgtcttgggaaatgcaaaaacagttttttaaagccagttactagatatcatgtatattttgttgttatagcacttgagatatcttagtccttactttacactctctttcagctctgaaacatcacacatctaagattcaagagtttgccgacctaactcaggttgaaacttttggctttcggggggaagctctgagctcactttgtgcactgaggtgatacaatatttttatccactcacttgaccccttagagaaacctctctgaaaattaattggaatcattattattttcagttttctatctcaacatctcaacttctagcttctgaattctgttttgtctcgctgccaatctaagtcatagtacttctgaaatgtgagcaataaatgaatgaaatgaagcaaatagtattgttaaaaagatggttacc

SEQ ID NO: 455 - DNA, 1103 bp, Homo sapiens
ctagcctagggaaaaaaaaagaggaaagaaagaaaaagctaaactatttagtctgggctagtaaatagccagaaaggactttataacaatgaaatatacaaaatgacactagtatgtttaactaaaggtatagttatgactcttaaatttgcatatgttataaataatgtcaatataaaaactgatagcatgggtccgtttttaataaatatgtaaatattttaaactttctagatctaaagcttaaggactatggagtggatcttattgaagtttcagacaatggatgtggggtagaagaagaaaacttcgaaggcttaagtaagttgactttttctaatcctattataaaataattgggtcacatgtctcagaattttgagtaacactgtcttgggaaatgcaaaaacagttttttaaagccagttactagatatcatgtatattttgttgttatagcacttgagatatcttagtccttactttacactctctttcagctctgaaacatcacacatctaagattcaagagtttgccgacctaactcaggttgaaacttttggctttcggggggaagctctgagctcactttgtgcactgaggtgatacaatatttttatccactcacttgaccccttagagaaacctctctgaaaattaattggaatcattattattttcagttttctatctcaacatctcaacttctagcttctgaattctgttttgtctcgctgccaatctaagtcatagtacttctgaaatgtgagcaataaatgaatgaaatgaagcaaatagtattgttaaaaagatggttacccttattaaaacagtaattctcaattttaacctaacatgtagataataaatgatagttaccattggttttcattatcaatttttagggaaacatttcaccaaagcactatttaattatagcacagatatgaaatttttataaataattatatatatatatatatatctttttttttttttagacagagtctctctttgtcacccaggctggagtgcagtggcacagtctcggctcactgcaatctctgccttccaggttcaagtgattctcgtgcctgagcct

SEQ ID NO: 456 - DNA, 1184 bp, Homo sapiens
tttttagtagagatgggatttcaccatgttgcctaggctggtctcaaactcctggcctcaagtgatctgcctgccttggcctcccaaagtgctgggataacaggcatgagccaccacgctctgccctacatatacattttaattataatatttgttagattctttaaaaaaaatttgttcgaagagtaataacaaaacaaatctgtgtttgtgaataaataaatcttaagatcatttatggttttgcagttcaacctgaaaaacgaaatcaaagcttttatcaaagcaaagcatgtttagtgctctctgtctcactgtcttttagatgccaaaccttagattttatgatgactcctcaaccatttagatcttgattatctcagagggatcgtcagctttttaagaaaattttgagagaaaagcaagtgaagaaaagagtagtcagtgcccaacatcatgggtctctcactgaacacaccatgcctggtattctctcacagcgatgtcaccatttctacctgccacgcatcggcgaaggttggaactcgactgatgtttgatcacaatgggaaaattatccagaaaaccccctacccccgccccagagggaccacagtcagcgtgcagcagttattttccacactacctgtgcgccataaggaatttcaaaggaatattaagaaggtacagtaaattaatcctggttttcaagagtattggttaatgcacatgagcaaaagatttactaaagatgtttattcttcagttgattctcttcccataaattattgagaaatgctttatttgcatttctcattaaagatttaacattaaagacttaactttaggatgatttacttttttcttttcatcacatagtgtttattaggactgggcaacacagtgagaccctgtctctatgaaaaattttaaaaaaaaatttactgggcatggtgacatgtacctgtagttccagctacttgggaggctgaagtgggaggatcacttgagcccaggaacttgaggctgcagtgagctatgattgcgccactgcacttaagactgggagacagaataagatcctgtctggaaaaatatatatacatatatatatattttttattttttatttttatctttttttgagatggagtttctctttggcgccctggctggagtgcggt

SEQ ID NO: 457 - DNA, 1168 bp, Homo sapiens
caccgaggctggagtgcagtggtgcaatcatggctcactgcagccttgaactcctaggctcaagcgatcctcccacctcagcctcctcagtagctgtgactacaggcacatgccatgacgcccggctaattttttttttaaattttttgtagagacagggtcttgctgtgttgcccaggctggtcttgaactcctggtctcaagtgatcctcctgccctcagcctcctgagtagctgggattacaggctgtactttttagttgttttaccaggatgcatggcacattgggaagtgagaggactgtgaccaggagccaaaagctctgcgttcctttctgtagaatataggaagacacctctttacagatcattctgtcaacagtgcttcccttgatttgtgcgatgatgtgagaaccttgcgttggatgttgtaacttgagctgtgtaattcctataatattaaagtaatgtagaatattgtgtttgtgttttttaaacaggagtatgccaaaatggtccaggtcttacatgcatactgtatcatttcagcaggcatccgtgtaagttgcaccaatcagcttggacaaggaaaacgacagcctgtggtatgcacaggtggaagccccagcataaaggaaaatatcggctctgtgtttgggcagaagcaggtagtgatggccggttacttcaacgcctcttattgctctagtgattatagcgggtttccattgtcccttccagtagaatggagaataaaatcttagaattgattttttttttttttttgagagggagtctcgcactgctgcccaggctggagtgcagtggtgttgtcttggctcactgcaacctccgcctcccagattcaagcaattctcctgcctcagcctcccgagtagtgggattacaagcatgctccactacgccaggctaattttttgtatctttagtagagacggggtttcaccgtgttggccaggctggtctcgaattcctgacctcgtgatccaccagcctcggcctcccaaagtgctgggattacaggtgtgagccaccaagcccggccggttttttttttttttgagctggagtcttgctctgttgcccaggttggagtgcagtggcgccatcttggctcactgcaacctctgcctcccgcgttgaagca

SEQ ID NO: 458 - DNA, 1098 bp, Homo sapiens
tttcatctttcttatatcataaaatcaaaattgttgttcccacggctcacacatgtaatcccagcactctgggagaggaaactgttgggattatgtgtttgaaccacccggccaacaattttgaggtgggagaatcgcttgagcccaggaatttaagaccagcttggataacacggcaagatcccatctctacaaaaaaattaaaaaattagccaggtgtggtggtgtgcacctgtagtcccagctactcactcgacaggctgacgcaggaggattgcttgaacccacgagtttgacattgcagtgaggtatgattgagccattgtactccagcctgggcaatagagggagaccctgtctcaaaaaacaaaacaaaacaaaagattcttttaattttttttgcgcttgtaatgtcaatagcttgactaagaaagaaaacagattaagtccactctgtctttattaggaagtaactgtgaatttttttttttttttttcagttgcaaagcctcattccttttgttcagctgccccctagtgactccgtgtgtgaagagtacggtttgagctgttccgatgctctgcataatcttttttagtaagtagattgctggcaagagaactacaattgaacattttatcctgagagctttttttttaaagatagtgattctaaggctaatagtttcgtgtctttttttttttttcttgagacggagtcttgctttgttgcccaggctggagtgcaatggtgctatcttggctcactgcaacctctacctcctgagttcaagcaattctcctgcctcagcctcctgagtagctgggattacaggcacgtgccaccacacccggctaattttgtatttttagtagagacggggtttcaccatgttggccaggctggtctcgaactcctgacctcagatgatccgcccaccttggtgtcccaaagtgctgggattacaggcatgagccaccacgcctggctagggataatagttttttatgtcctttataaaactgtgagcaatgctgtggctaagaaagatgatttatacaaaggagtcagttgcttaattcaaaccatgttttgag

SEQ ID NO: 459 - DNA, 1100 bp, Homo sapiens
tggaaatgccggtatccctggggtgggtctcatgtgaagcaagcgctttaccaagacatgagatataagcgtcctacccgggaggttttgaaaggggagggaatgtgggcaaaattctgagcacaagtggttagacttcattgacaaaccaggggtggcagcacggaggttctgagaatgcatttgaagcgagacccacttacagaggctgaggatttatcaggaagggtaaggagagctgcaacacatcagttttggacgcactgcatcacctgtggtgcattggttgactgtaggagctttagaatattccagaaggtttggttctttgatgactcatcaagatttggagcacagatacccgtgaactgcaatagtgatccttatcagcatgtcacctggtgttttgttttcatttcactttaagaatgtgccatgtgatcgtatttctaatccctttcactctggaatcctgcccttaccatattaatgttgaatagcatctcaggtttcatttcacaatgcacgcatggagttggaaggagttcaacagacagacagtttttctttatcaaccggcggccttgtgacccagcaaaggtatttaaaatttttttgtgttagtttgttctttatgcctttgacttttaattgataacttttttctgataataggcagtttacgtggagctcgggactttgagaaacatggctttaacattatcttattttgtgcatttacagaagtctaccgcagatggcccccagcttcagatgtttcaactgaagacttttctgtccgggcgcagtggctcatgcctgtaatcccagcactttgggaggccgaggcgggtggattgcctgaggccaggagttcgagaccagcctggccaacatgacaaaaccccgtctctactaaaatacaaaaaataaccaggcatggtgttccacgcctgtaatcccagctacatgggaggctgaggcaggaggatcacttgaacctgggagatggagcttgcagtaagccgagattatgccactgcactccagcctgggtgacagagcgagactgtgtttcaaaaaaatatatatatattttt

SEQ ID NO: 460 - DNA, 1085 bp, Homo sapiens
aactgaggtcaggagttcgagaccagcctggccaacatggtgaaaccccatctctactaaaaacacaaaaattatctggtcatggtggcgtgtgcctgtaatcccagctactctggaggctgagtcaggataatcacttgagccccggaggcagaggttgcagtgagccaagatcgtgccattacactccagtctgggtaacaagagcgagactccgttgaaaaaaaaaaagaaaaaaaaatcctgcctgtaatccaagttacatgtcaggctgacacaggaggatcacttgagcctgggaggttgaggctgcagtgagccatgattgctccactgcactccaggctgtgacaaggcgagaccttgactcaaaaaaaaaaaaaacaaaaaagtatccccttctaagaacatgctggttggttagaatagaatgttgttagaatgcggggggctgggaacatttgtcatttattcttttctactccttgtattttgtgcaggtctgcagactcgtgaatgaggtctaccacatgtataatcgacaccagtatccatttgttgttcttaacatttctgttgattcaggtaagttccattggcatttcagtacaactagtgactaatgcctcaaagaataaaatgaaattctacagctctgctatgactggaatgagataacaatttatggtcatgtaagttttttgtttttgtttttttttgagacggggtcttgctctgtcacccaggctggagtgtggtggcgtgatctcggctcactgcaacctctgcctcccgggttcaagcgattctcctgactcagcctcccaagtagctgggactacaggtgcgtgccaccacacctggctaattttttgtatttttagtagagacagggtttcaccgtgttagccaggatggtctcgatctcctgacctcgtgatctgcccgtcttggcctcccaaagtgctgggattacaggcatgagccaccgtgcctggccctataattttttttttttttaaacagagttcccgctttctacttgagactatgttaattatattgttaggaaaatgtaatttttt

SEQ ID NO: 461 - DNA, 1156 bp, Homo sapiens
aattgtcttttgctcatttatttgaaaaagctgatttcataacttatgaatcttaacctggacactgtaatgtttttaatagcacttgtgataaatacaagtgaatgaaataatagatggggaaatttctattgttaaaagtgaatttggctgggcgcggtggctcacgcctgtaatcccagaactttgggaggccaaggcgggtggatcacttgaggttgtgagttcgagaccagcctggccaacacggtgaaaccccatctctactaaaaatacaaaaattagccagtgtggtggcacttgcctgtaatcctagctacttcggaggctgaggcagggagaatcacttgaacccaggaggcggaggttgcagtgagctgagatcgcgccactgcactccagcctaggcgacagagtgagacgctgtctgaaaataataattaataaataaaataaaagtgaatttaaacataataaatatgttttcttttttgccttagaatgcgttgatatcaatgttactccagataaaaggcaaattttgctacaagaggaaaagcttttgttggcagttttaaagacctctttgataggaatgtttgatagtgatgtcaacaagctaaatgtcagtcagcagccactgctggatgttgaaggtaagaaaaatacagtgtacaaacagcttctaaagcttttagctaatgtgtttccttattttttccaagtaaacttttttttgacatgaaaacaaagtctcttatattattttatcatttttaattcttttttgagacagggacttgctctgtcacccaggctggactgcagtggtgccattgtagctcactgcagcatcacactcctgggctcaggccatcttcctgcctcagcctcccaagtagctgcctccaagtacctctagttttttgtaaactgtaaacggatgaagtcatataagatatatgattagaagaagtctgcagtgactgcatttttaactcccttgtcatgtctgtttttttgagatggagtttcgctcttgtcacccaggctggagtgcaatgatgcgatctcagctcactgcaaccttgaagcctcccacgttcaagagattctcctgcctcagcctcctgagtagctgggattacaggcgccc

SEQ ID NO: 462 - DNA, 1862 bp, Homo sapiens
accattctggtgagtatatggccatattgcattgtgttgtggttttttttttttttttttttttttttgagacagagtgttgctctgtcacccaggctggagagcagtggtggcatcttggctcactgcaacctctgcctcccgggctaaagggattctcgtgcctcagcctcccaagtagctgggatgacagatatgccaccacacccggctaatttttgtatttttagtagaaacagggttttaccatgttgtccagaccagtcctgaactcctagcctcatgtgatccccctgccttggcctcctaaagtgctgggataacaggcgtaagccaccacacctggcccatattatagttttattttgaacattgaactgtgttcatctgtgtaattagcatgtggatctcctcttttgtgaagtatctgttcacataagcacgtcctctcaccatttcaggatagtccctgaccctcttctccgtccacgtttgcttaggtaacttaataaaaatgcatgcagcggatttggaaaagcccatggtagaaaagcaggatcaatccccttcattaaggactggagaagaaaaaaaagacgtgtccatttccagactgcgagaggccttttctcttcgtcacacaacagagaacaagcctcacagcccaaagactccagaaccaagaaggagccctctaggacagaaaaggggtatgctgtcttctagcacttcaggtgccatctctgacaaaggcgtcctgagacctcagaaagaggcagtgagttccagtcacggacccagtgaccctacggacagagcggaggtggagaaggactcggggcacggcagcacttccgtggattctgaggggttcagcatcccagacacgggcagtcactgcagcagcgagtatgcggccagctccccaggggacaggggctcgcaggaacatgtggactctcaggagaaagcgcctaaaactgacgactctttttcagatgtggactgccattcaaaccaggaagataccggatgtaaatttcgagttttgcctcagccaactaatctcgcaaccccaaacacaaagcgttttaaaaaagaagaaattctttccagttctgacatttgtcaaaagttagtaaatactcaggacatgtcagcctctcaggttgatgtagctgtgaaaattaataagaaagttgtgcccctggacttttctatgagttctttagctaaacgaataaagcagttacatcatgaagcacagcaaagtgaaggggaacagaattacaggaagtttagggcaaagatttgtcctggagaaaatcaagcagccgaagatgaactaagaaaagagataaggtaaagttttaattttttactttttctctttttatctaaaatttttatttttattttttatttttttgagacagagtcttgctctgttgcgcaggctggaatgcagtggcatgatcttggctcactgcagcctccacctcccgggttcaagcgtttctcctgcctcagcctcctgagtagctgggattacaggtgcacgccaccatgcctggctaatttttatatttttggtggaaacagggtttcaccatgttggctgggctggtctcgaactcctgacttcaggtgatccagccaccttggcctcccaaagtgctgggattacaggtgtgagccaccacacccggccaggtaaagttttttcttaagagtattttgaggctaggtgtggtggctcacacctgtaatcccagtactttgggaggccaagccaaggagggaggatcacttgagcccaggagttcaagaccagcctggacaacatagggagacctcgtctc

SEQ ID NO: 463 - DNA, 1168 bp, Homo sapiens
tcgttaatagtagcaactgatgtcttctccggagagttggatgaatgaataattaatgttatctttagaaagtgggatggttaagccgaacgcagtggctcacgcctgtaatcccagcactttgggaggccaaggcgggcagatcatgaggtcaggagttcgagaccagcctgaccaacatggtggaactctgtctctactaaaaatacaaaaattagctgggcatggtggcgcacctgtaatcccagctactcaggaggctgaggcagaagaatcactcgaacccgggaggtggaggttgcagtgagccaagattgtgccattgcactgtagcctgggtgacagaacgagactctgtttcaaaaaaaaagaaagcgggatggctagggactttattttgtttttgtattgtttgactttttttttattacagtgttctataacataatcagaaaaataatcttgtaaaatgtctgataattaacattttctacctgcagtaaaacgatgtttgcagaaatggaaatcattggtcagtttaacctgggatttataataaccaaactgaatgaggatatcttcatagtggaccagcatgccacggacgagaagtataacttcgagatgctgcagcagcacaccgtgctccaggggcagaggctcatagcgtgagtgtgtttagtgttcattcccagactccccctcaaattgaagatctaatagaggccaaggcaggaggatcacaagaggccaggagtttgagaccagcccggacaacacagcaagaccttgtatctactttaaaaaagaagagatctaggaaggaggggtgtaaaaaataaaaaatatctagttggccaggcgcggtgcctcacacctgtaatcccagcactttgggaggccgaggcaggcagatcacctgaggtcaggagttggagaccagcctggccaacgtggtgaaaccccgcctctactaaaaatacaaaaaggccaggcacggtggctcacgcctataatcccggcactttgggaggccgaggtgggcagatcacttcaggtcgggagttcgagaccagcctgaccaacatggtgagacctgtctctactaaaaatacaaaattagccaggcgtggtggcgggcgcctgtagtcccagctacttgggaggc

SEQ ID NO: 464 - DNA, 1101 bp, Homo sapiens
agagtcttgttgtgtcgcccaggctggagtacagtggcgtgatcttggctctcactacaacctctgcctccctcctgggttcaaacgaatctcatgcctaagcctcccaagtagctgggactacaggcgtgcgccaccatgcctggcctaatttttatatttttagtagagagagtgtttcgctgtgttgaccaggccggtctcaaactcctggcctcaagagatctgcctgcctcgggctcctaaagtgctgagattacaggcgtgagccaccgcacctggcctgtagctactttaacttctaaaaagaactttaagaaagagaaaattaaaaggaacttctcaggaagttttgtgacacttagctgagtagtgttgttatttgtgttgttattttgacatgaattcaaaatacagtattgttgttttcatttcatttctgctgtaaagctaaatgtttgacttcaggatatggtttgaatcatttttgtgtttttcagacctcagactctcaacttaactgctgttaatgaagctgttctgatagaaaatctggaaatatttagaaagaatggctttgattttgttatcgatgaaaatggtaagttattaattagaactatagcggctgggtgtggtggctcacgtctgtaatcccagcactctgggaggccaaggcgggcagatcgcctgaggtcaggagtttgagaccagcctggctaacatggtgaaaccccatctctactgaaaatacaaaaagtagccgggcgtggtggcgggtgcctgtaatcccagctactcaggaggctgaggtgggagaatcgcttgaacccgggaggtggaggttgcagtgagccgagatcacgtcactgcactccagcctgggcaacaagagtgaaactctgtctcaaaaaaaaaaaaaaatcagaactatagattcttgtctttttagagctgggaataatctttcaggtcatatagaccagttttttttaattttataaaagattaaaaagttcctccaaaaagcattttgtgagtttcctctctttcaggtgttcactttttttttttctgagatggagtcttgctctgtcgccc

SEQ ID NO: 465 - DNA, 1170 bp, Homo sapiens
cttgtctttttagagctgggaataatctttcaggtcatatagaccagttttttttaattttataaaagattaaaaagttcctccaaaaagcattttgtgagtttcctctctttcaggtgttcactttttttttttctgagatggagtcttgctctgtcgcccaggctggagcgcagtggtgccgatctcggctcactgcaagctccgcctcccaggttcacaccattctcctgcctcagcctcccgagtagctgggactacaggtgcctgccaccacacccagctaattttttctattttttagtagagacggggtttcaccatgttagccaggatggtctgtatctcctgacctcatgatccgctggcctcagcctcccaaagtgcagggattacaggcgtgagccaccacgcccggcctcagatgttcatcctaagtagctttcaagtgaaacgtgtttgtcaagtcatggatttttctcaaaattgtattcttttagctccagtcactgaaagggctaaactgatttccttgccaactagtaaaaactggaccttcggaccccaggacgtcgatgaactgatcttcatgctgagcgacagccctggggtcatgtgccggccttcccgagtcaagcagatgtttgcctccagagcctgccggaagtcggtaagtaaagaaagcctggctgtcagctcagctgctcaagcttgcagtcgaggaaggtctcagcccagctcctgatttggtcaaggttgtaaacgcctttgtgattgccaggggtcattttacacagagagctacgtgcagcgtcgtagctgagcatctgtgtcgtctgcgttctctgtgaccttgaactcataattattgctcttttgttacctctgttaagcagtattcttggccgggcatggtggctcaagcctctaatcccagcactttgggaagctgaggcgggcggatcacgagttcaggagatcgagaccatcctggctaacatggtgaaagcccgtctctactaaaaatacaaaaaaattagccgggcgtggtgtcgggcgcctatagtcccagctactcgggaggctgaggcaggagaatggcgtgaacccagaaggcggaacttgcagtgagccaagttcataccactgcactccaacctgggcgacaga

SEQ ID NO: 466 - DNA, 1304 bp, Homo sapiens
aggaagggaggcattcgtgcttggaggtgggggtgcaggcacagcccagcgagggccaagtcaggggacagacgggggcttttattcaggtgagggggagagctgtgaagtggaatgaataacctgacagccctttaaaagtaatcactggctgctgagtggagagcggctcggaggggtcgcagtggggcagggaggcctgctgggaggctgctgcacctgccagggtgagagggcagggtggctgctgagacaggtgtggtcggcgtctggagtggaggcggtgccaccttgaaggagccacaaggagcctgatttcacagaagggtggagggctgagatctagaacctaggcttctctgggggaaggtttttcagggaaggtagtttttgagctgtaatcttgtccagccttattttagagaagaatgcttctgaagagctgccattctgacgtcaaaaaactactaaaacgttgaaccattgtgtctcacactcaggtgatgattgggactgctcttaacacaagcgagatgaagaaactgatcacccacatgggggagatggaccacccctggaactgtccccatggaaggccaaccatgagacacatcgccaacctgggtgtcatttctcagaactgaccgtagtcactgtatggaataattggttttatcgcagatttttatgttttgaaagacagagtcttcactaaccttttttgttttaaaatgaacctgctacttaaaaaaaatacacatcacacccatttaaaagtgatcttgagaaccttttcaaaccagatggagcattgcttgcaaattttttttctctatgtttgcatgcgctcgtgtgtgtgtgtccaggcaagaacacattttataaaaataagaacacttgggctgggcatggtggctcatgcctgtgatcgcagcactttgggaggccgaggccggcggatcacctgagatcagaagttcgagaccagcctgaccaacatggagaaaccctgcctctactaaaaatacaaaattagccaggtgtgctggcgcatgcctgtaatccccgctacccaggaggctgaggcaggagaatcgcttgaacccgggagacggaggttgcagtgaaccgagattgcgccactgcgctccagcctgggtgagatagaacaagactgtgtctcaaaaaacaaaacaaaacaaaacaaaaaaaaaaaaaccaaaccactttggaagttactcaggcctctgctctggctggacatagtttagtctataactttcaacccttaatgataattaaat

SEQ ID NO: 467 - DNA, 1500 bp, Homo sapiens
aaggagcctgatttcacagaagggtggagggctgagatctagaacctaggcttctctgggggaaggtttttcagggaaggtagtttttgagctgtaatcttgtccagccttattttagagaagaatgcttctgaagagctgccattctgacgtcaaaaaactactaaaacgttgaaccattgtgtctcacactcaggtgatgattgggactgctcttaacacaagcgagatgaagaaactgatcacccacatgggggagatggaccacccctggaactgtccccatggaaggccaaccatgagacacatcgccaacctgggtgtcatttctcagaactgaccgtagtcactgtatggaataattggttttatcgcagatttttatgttttgaaagacagagtcttcactaaccttttttgttttaaaatgaacctgctacttaaaaaaaatacacatcacacccatttaaaagtgatcttgagaaccttttcaaaccagatggagcattgcttgcaaattttttttctctatgtttgcatgcgctcgtgtgtgtgtgtccaggcaagaacacattttataaaaataagaacacttgggctgggcatggtggctcatgcctgtgatcgcagcactttgggaggccgaggccggcggatcacctgagatcagaagttcgagaccagcctgaccaacatggagaaaccctgcctctactaaaaatacaaaattagccaggtgtgctggcgcatgcctgtaatccccgctacccaggaggctgaggcaggagaatcgcttgaacccgggagacggaggttgcagtgaaccgagattgcgccactgcgctccagcctgggtgagatagaacaagactgtgtctcaaaaaacaaaacaaaacaaaacaaaaaaaaaaaaaccaaaccactttggaagttactcaggcctctgctctggctggacatagtttagtctataactttcaacccttaatgataattaaattcatctttgtttaatttcataaatttaaaagtagggtccttttcagttagtgattctcagccctgattcacattaaatttttaaacacgggggattctctgcccggctggaagaaaatgactggatgggacaggggtcactatttgaaacattcctctgtgcggccaaggtcgcaaaatgctgtcctcgcaggggaacaaaaagagtttgatttcccataatttgatgctgtgatttggtttcctcaggatgtgaactgtagaacattccagttactggccttgaatggttctgggaatataagaatccctgtctgtcttttcaaatagttttcatggaaccttgtcctgtttgaacttggctgaaaatggaagtaaagatgccctcttgggggcccagagatgacagatgtggctccccctgctgcccccaccccttctccagactgtgggcggctccccttcctgctttagaatccctcagatggaggaggcagtaca

SEQ ID NO: 468 - DNA, 8065 bp, Homo sapiens
acccaggagggctgtgctgatagcacgttcctcgagtttactttgctttccttgagtttattgtaaaggggtaaagttttcggatccgtcacgtgaccctgacaggtcctgcctatggcgcggcagaccacccacgccgagggccatggaactgcttaatagaaacaggcttgtaattgtgagtccgcgctgcactccgccgaaagcctccggcggcccagcgcgccggggtttttacactttccgttccttttgtaaagacggaggaggaggagaagaagaagaagaaaacggaggagaagaaaaagacgacaggggagacaaagagacccgcagcgacaaggcaagggggagacgagggaagactgggagaagacggaggagcggaggacgaggaaaggggggccagggaaaaaaaaggaattgatgtgaaatccaagcccagcgtccgcgccatcggcacccgcgctccgagcaggggttgacggccggctatggggaaggctactggccggaaagcgccgctgtggctgagagcgaagtttcagagactcttatttaaactgggttgttacattcaaaaaaactgcggcaagttcttggttgtgggcctcctcatatttggggccttcgcggtgggattaaaagcagcgaacctcgagaccaacgtggaggagctgtgggtggaagttggaggacgagtaagtcgtgaattaaattatactcgccagaagattggagaagaggctatgtttaatcctcaactcatgatacagacccctaaagaagaaggtgctaatgtcctgaccacagaagcgctcctacaacacctggactcggcactccaggccagccgtgtccatgtatacatgtacaacaggcagtggaaattggaacatttgtgttacaaatcaggagagcttatcacagaaacaggttacatggatcagataatagaatatctttacccttgtttgattattacacctttggactgcttctgggaaggggcgaaattacagtctgggacagcatacctcctaggtaaacctcctttgcggtggacaaacttcgaccctttggaattcctggaagagttaaagaaaataaactatcaagtggacagctgggaggaaatgctgaataaggctgaggttggtcatggttacatggaccgcccctgcctcaatccggccgatccagactgccccgccacagcccccaacaaaaattcaaccaaacctcttgatatggcccttgttttgaatggtggatgtcatggcttatccagaaagtatatgcactggcaggaggagttgattgtgggtggcacagtcaagaacagcactggaaaactcgtcagcgcccatgccctgcagaccatgttccagttaatgactcccaagcaaatgtacgagcacttcaaggggtacgagtatgtctcacacatcaactggaacgaggacaaagcggcagccatcctggaggcctggcagaggacatatgtggaggtggttcatcagagtgtcgcacagaactccactcaaaaggtgctttccttcaccaccacgaccctggacgacatcctgaaatccttctctgacgtcagtgtcatccgcgtggccagcggctacttactcatgctcgcctatgcctgtctaaccatgctgcgctgggactgctccaagtcccagggtgccgtggggctggctggcgtcctgctggttgcactgtcagtggctgcaggactgggcctgtgctcattgatcggaatttcctttaacgctgcaacaactcaggttttgccatttctcgctcttggtgttggtgtggatgatgtttttcttctggcccacgccttcagtgaaacaggacagaataaaagaatcccttttgaggacaggaccggggagtgcctgaagcgcacaggagccagcgtggccctcacgtccatcagcaatgtcacagccttcttcatggccgcgttaatcccaattcccgctctgcgggcgttctccctccaggcagcggtagtagtggtgttcaattttgccatggttctgctcatttttcctgcaattctcagcatggatttatatcgacgcgaggacaggagactggatattttctgctgttttacaagcccctgcgtcagcagagtgattcaggttgaacctcaggcctacaccgacacacacgacaatacccgctacagccccccacctccctacagcagccacagctttgcccatgaaacgcagattaccatgcagtccactgtccagctccgcacggagtacgacccccacacgcacgtgtactacaccaccgctgagccgcgctccgagatctctgtgcagcccgtcaccgtgacacaggacaccctcagctgccagagcccagagagcaccagctccacaagggacctgctctcccagttctccgactccagcctccactgcctcgagcccccctgtacgaagtggacactctcatcttttgctgagaagcactatgctcctttcctcttgaaaccaaaagccaaggtagtggtgatcttcctttttctgggcttgctgggggtcagcctttatggcaccacccgagtgagagacgggctggaccttacggacattgtacctcgggaaaccagagaatatgactttattgctgcacaattcaaatacttttctttctacaacatgtatatagtcacccagaaagcagactacccgaatatccagcacttactttacgacctacacaggagtttcagtaacgtgaagtatgtcatgttggaagaaaacaaacagcttcccaaaatgtggctgcactacttcagagactggcttcagggacttcaggatgcatttgacagtgactgggaaaccgggaaaatcatgccaaacaattacaagaatggatcagacgatggagtccttgcctacaaactcctggtgcaaaccggcagccgcgataagcccatcgacatcagccagttgactaaacagcgtctggtggatgcagatggcatcattaatcccagcgctttctacatctacctgacggcttgggtcagcaacgaccccgtcgcgtatgctgcctcccaggccaacatccggccacaccgaccagaatgggtccacgacaaagccgactacatgcctgaaacaaggctgagaatcccggcagcagagcccatcgagtatgcccagttccctttctacctcaacggcttgcgggacacctcagactttgtggaggcaattgaaaaagtaaggaccatctgcagcaactatacgagcctggggctgtccagttaccccaacggctaccccttcctcttctgggagcagtacatcggcctccgccactggctgctgctgttcatcagcgtggtgttggcctgcacattcctcgtgtgcgctgtcttccttctgaacccctggacggccgggatcattgtgatggtcctggcgctgatgacggtcgagctgttcggcatgatgggcctcatcggaatcaagctcagtgccgtgcccgtggtcatcctgatcgcttctgttggcataggagtggagttcaccgttcacgttgctttggcctttctgacggccatcggcgacaagaaccgcagggctgtgcttgccctggagcacatgtttgcacccgtcctggatggcgccgtgtccactctgctgggagtgctgatgctggcgggatctgagttcgacttcattgtcaggtatttctttgctgtgctggcgatcctcaccatcctcggcgttctcaatgggctggttttgcttcccgtgcttttgtctttctttggaccatatcctgaggtgtctccagccaacggcttgaaccgcctgcccacaccctcccctgagccaccccccagcgtggtccgcttcgccatgccgcccggccacacgcacagcgggtctgattcctccgactcggagtatagttcccagacgacagtgtcaggcctcagcgaggagcttcggcactacgaggcccagcagggcgcgggaggccctgcccaccaagtgatcgtggaagccacagaaaaccccgtcttcgcccactccactgtggtccatcccgaatccaggcatcacccaccctcgaacccgagacagcagccccacctggactcagggtccctgcctcccggacggcaaggccagcagccccgcagggacccccccagagaaggcttgtggccacccccctacagaccgcgcagagacgcttttgaaatttctactgaagggcattctggccctagcaatagggcccgctggggccctcgcggggcccgttctcacaaccctcggaacccagcgtccactgccatgggcagctccgtgcccggctactgccagcccatcaccactgtgacggcttctgcctccgtgactgtcgccgtgcacccgccgcctgtccctgggcctgggcggaacccccgagggggactctgcccaggctaccctgagactgaccacggcctgtttgaggacccccacgtgcctttccacgtccggtgtgagaggagggattcgaaggtggaagtcattgagctgcaggacgtggaatgcgaggagaggccccggggaagcagctccaactgagggtgattaaaatctgaagcaaagaggccaaagattggaaaccccccacccccacctctttccagaactgcttgaagagaactggttggagttatggaaaagatgccctgtgccaggacagcagttcattgttactgtaaccgattgtattattttgttaaatatttctataaatatttaagagatgtacacatgtgtaatataggaaggaaggatgtaaagtggtatgatctggggcttctccactcctgccccagagtgtggaggccacagtggggcctctccgtatttgtgcattgggctccgtgccacaaccaagcttcattagtcttaaatttcagcatatgttgctgctgcttaaatattgtataatttacttgtataattctatgcaaatattgcttatgtaataggattattttgtaaaggtttctgtttaaaatattttaaatttgcatatcacaaccctgtggtagtatgaaatgttactgttaactttcaaacacgctatgcgtgataatttttttgtttaatgagcagatatgaagaaagcacgttaatcctggtggcttctctaggtgtcgttgtgtgcggtcctcttgtttggctgtgcgtgtgaacacgtgtgtgagttcaccatgtactgtactgtgattttttttttgtcttgttttgtttctctacactgtctgtaacctgtagtaggctctgacctagtcaggctggaagcgtcaggatatcttttcttcgtgctggtgagggctggccctaaacatccacctaatcctttcaaatcagcccggcaaaagctagactctcctcgtgtctacggcatctcttatgatcattggctgccatccaggaccccaatttgtgcttcagggggataatctccttctctcggatcattgtgatggatgctggaacctcagggtatggagctcacatcagttcatcatggtgggtgttagagaattcggtgacatgcctagtgctgagccttggctgggccatgagagtctgtatactctaaaaagcatgcagcatggtgcccctcttctgaccaacacacacacgacccctcccccaacacccccaaattcaagagtggatgtggccctgtcacaggtagaaaaacctatttagttaattctttcttggcccacagtctcccagaaatgatgttttgagtccctatagtttaaactccctctcttaaatggagcagctggttgaggctttctagatctgtttgcatcttctttaaaactaagtggtgagcatgcattgtggtgtagaggcaggcattatgtaggataagagctccggggggattcttcatgcaccagtgtttagggtacgtgcttcctaagtaaatccaaacattgtctccatcctccccgtcattagtgctctttcaatgtgatgtgggaaagcaggaggatggacacaccccactgaaagatgtaggcaggggcaggtctctcaaccaggcatatttttaaaagttgcttctgtactggttctcttcttttgctctgaggtgtgggctccctcatctcgtaaccagagaccagcacatgtcagggaagcacccagtgtcggctccccatccaaatccacaccagcaccttgttacagacaagaagtcagaggaaagggcggggtccctgcagggctgaagcctaagctactgtgaggcgctcacgagtggcagctcctgttactcccttttaaattacctgggaaatcttaacagaaaggtaatgggcccccagaaatacccacagcatagtgacctcagaccctgatactcaccacaaaacttttaagatgctgattgggagccgcttgtggctgctgggtgtgtgtgtgtgtgtgtgcgtgcgtgcgtgtgtgtgtgtctctgctggggaccctggccacccccctgctgctgtcttggtgcctgtcacccacatggtctgccatcctaacacccagctctgctcagaaaacgtcctgcgtggaggagggatgatgcagaattctgaagtcgacttccctctggctcctggcgtgccctcgctcccttcctgagcccagctcgtgttgcgccggaggctgcgcggcccctgatttctgcatggtgtagaactttctccaatagtcacattggcaaagggagaactggggtgggcggggggtggggctggcagggaattagaatttctctctctcttttaatagttttattttgtctgtcctgtttgttcatttggatgttttaatttttaaaaaaaaaaaaactttgctgatatttataattttgtatcataagaatgttttcctctacagtatttgtcatgccagtttataacaaaaaaaaatgcagggattttatttctattggaaacattacagctatgttttacttttggacagaatttttatttgtatagagtgcttactaatgttaaatagttcagagtatataacatttacattaaggactcatggtaggttttagggtaaggagtttaaaggaaataaatattcaaactgggtctcattgccaattttggtggaaatgagtttgtgtcatttcaattacaaagataaaagtatgccatataatttatttatatgaagatttatttttgtagtgtacatagtagtcatcaagtcttttgacagaagtatatttttaaagaatttatatgtgatgaatccataatgtctggaactttgctgagacatgagtgggcacagttttcattgtaaattacagcaaggaaagaaaatgtttaacagtgttaagagagtcagagcagagtggatattcatgcgattatgaagtgtttattagttaccattggcgacctagcatgcttctcatttcaaaccttggaaggtgaaaatgtacaaactctctaaataattaatgttcaaacactgatagaaattctaacatgaataaaaaataatataacttgttggttatatctttgtttgtagaatgctttttttctttaaaatacttgggagagacagttagtgttggagccatcagaaactgttgtttcatcttgctgaccttgtgacactcttcttttttgctctatctgatggagagagttttaggttttcctcctttttgttttgtataaatagtgggtataagcatagctctgttacatggatgtattacaaagtgggggctgagcttttagtgtgatcatcacccaaatagtgtacattgtacccattaattaatttcttatcacctgaccctatttttgttttctcataccaagaaacttcctaagttaaccatcaaaattagtccttctgtcatctctcttagcatacttatttcccttatgtgatgcctaataatgagggaacataaataaagccaaattcaaagataaaaaaaaaaaaaa

SEQ ID NO: 469 - DNA, 7911 bp, Homo sapiens
acccaggagggctgtgctgatagcacgttcctcgagtttactttgctttccttgagtttattgtaaaggggtaaagttttcggatccgtcacgtgaccctgacaggtcctgcctatggcgcggcagaccacccacgccgagggccatggaactgcttaatagaaacaggcttgtaattgtgagtccgcgctgcactccgccgaaagcctccggcggcccagcgcgccggggtttttacactttccgttccttttgtaaagacggaggaggaggagaagaagaagaagaaaacggaggagaagaaaaagacgacaggggagacaaagagacccgcagcgacaaggggaaggctactggccggaaagcgccgctgtggctgagagcgaagtttcagagactcttatttaaactgggttgttacattcaaaaaaactgcggcaagttcttggttgtgggcctcctcatatttggggccttcgcggtgggattaaaagcagcgaacctcgagaccaacgtggaggagctgtgggtggaagttggaggacgagtaagtcgtgaattaaattatactcgccagaagattggagaagaggctatgtttaatcctcaactcatgatacagacccctaaagaagaaggtgctaatgtcctgaccacagaagcgctcctacaacacctggactcggcactccaggccagccgtgtccatgtatacatgtacaacaggcagtggaaattggaacatttgtgttacaaatcaggagagcttatcacagaaacaggttacatggatcagataatagaatatctttacccttgtttgattattacacctttggactgcttctgggaaggggcgaaattacagtctgggacagcatacctcctaggtaaacctcctttgcggtggacaaacttcgaccctttggaattcctggaagagttaaagaaaataaactatcaagtggacagctgggaggaaatgctgaataaggctgaggttggtcatggttacatggaccgcccctgcctcaatccggccgatccagactgccccgccacagcccccaacaaaaattcaaccaaacctcttgatatggcccttgttttgaatggtggatgtcatggcttatccagaaagtatatgcactggcaggaggagttgattgtgggtggcacagtcaagaacagcactggaaaactcgtcagcgcccatgccctgcagaccatgttccagttaatgactcccaagcaaatgtacgagcacttcaaggggtacgagtatgtctcacacatcaactggaacgaggacaaagcggcagccatcctggaggcctggcagaggacatatgtggaggtggttcatcagagtgtcgcacagaactccactcaaaaggtgctttccttcaccaccacgaccctggacgacatcctgaaatccttctctgacgtcagtgtcatccgcgtggccagcggctacttactcatgctcgcctatgcctgtctaaccatgctgcgctgggactgctccaagtcccagggtgccgtggggctggctggcgtcctgctggttgcactgtcagtggctgcaggactgggcctgtgctcattgatcggaatttcctttaacgctgcaacaactcaggttttgccatttctcgctcttggtgttggtgtggatgatgtttttcttctggcccacgccttcagtgaaacaggacagaataaaagaatcccttttgaggacaggaccggggagtgcctgaagcgcacaggagccagcgtggccctcacgtccatcagcaatgtcacagccttcttcatggccgcgttaatcccaattcccgctctgcgggcgttctccctccaggcagcggtagtagtggtgttcaattttgccatggttctgctcatttttcctgcaattctcagcatggatttatatcgacgcgaggacaggagactggatattttctgctgttttacaagcccctgcgtcagcagagtgattcaggttgaacctcaggcctacaccgacacacacgacaatacccgctacagccccccacctccctacagcagccacagctttgcccatgaaacgcagattaccatgcagtccactgtccagctccgcacggagtacgacccccacacgcacgtgtactacaccaccgctgagccgcgctccgagatctctgtgcagcccgtcaccgtgacacaggacaccctcagctgccagagcccagagagcaccagctccacaagggacctgctctcccagttctccgactccagcctccactgcctcgagcccccctgtacgaagtggacactctcatcttttgctgagaagcactatgctcctttcctcttgaaaccaaaagccaaggtagtggtgatcttcctttttctgggcttgctgggggtcagcctttatggcaccacccgagtgagagacgggctggaccttacggacattgtacctcgggaaaccagagaatatgactttattgctgcacaattcaaatacttttctttctacaacatgtatatagtcacccagaaagcagactacccgaatatccagcacttactttacgacctacacaggagtttcagtaacgtgaagtatgtcatgttggaagaaaacaaacagcttcccaaaatgtggctgcactacttcagagactggcttcagggacttcaggatgcatttgacagtgactgggaaaccgggaaaatcatgccaaacaattacaagaatggatcagacgatggagtccttgcctacaaactcctggtgcaaaccggcagccgcgataagcccatcgacatcagccagttgactaaacagcgtctggtggatgcagatggcatcattaatcccagcgctttctacatctacctgacggcttgggtcagcaacgaccccgtcgcgtatgctgcctcccaggccaacatccggccacaccgaccagaatgggtccacgacaaagccgactacatgcctgaaacaaggctgagaatcccggcagcagagcccatcgagtatgcccagttccctttctacctcaacggcttgcgggacacctcagactttgtggaggcaattgaaaaagtaaggaccatctgcagcaactatacgagcctggggctgtccagttaccccaacggctaccccttcctcttctgggagcagtacatcggcctccgccactggctgctgctgttcatcagcgtggtgttggcctgcacattcctcgtgtgcgctgtcttccttctgaacccctggacggccgggatcattgtgatggtcctggcgctgatgacggtcgagctgttcggcatgatgggcctcatcggaatcaagctcagtgccgtgcccgtggtcatcctgatcgcttctgttggcataggagtggagttcaccgttcacgttgctttggcctttctgacggccatcggcgacaagaaccgcagggctgtgcttgccctggagcacatgtttgcacccgtcctggatggcgccgtgtccactctgctgggagtgctgatgctggcgggatctgagttcgacttcattgtcaggtatttctttgctgtgctggcgatcctcaccatcctcggcgttctcaatgggctggttttgcttcccgtgcttttgtctttctttggaccatatcctgaggtgtctccagccaacggcttgaaccgcctgcccacaccctcccctgagccaccccccagcgtggtccgcttcgccatgccgcccggccacacgcacagcgggtctgattcctccgactcggagtatagttcccagacgacagtgtcaggcctcagcgaggagcttcggcactacgaggcccagcagggcgcgggaggccctgcccaccaagtgatcgtggaagccacagaaaaccccgtcttcgcccactccactgtggtccatcccgaatccaggcatcacccaccctcgaacccgagacagcagccccacctggactcagggtccctgcctcccggacggcaaggccagcagccccgcagggacccccccagagaaggcttgtggccacccccctacagaccgcgcagagacgcttttgaaatttctactgaagggcattctggccctagcaatagggcccgctggggccctcgcggggcccgttctcacaaccctcggaacccagcgtccactgccatgggcagctccgtgcccggctactgccagcccatcaccactgtgacggcttctgcctccgtgactgtcgccgtgcacccgccgcctgtccctgggcctgggcggaacccccgagggggactctgcccaggctaccctgagactgaccacggcctgtttgaggacccccacgtgcctttccacgtccggtgtgagaggagggattcgaaggtggaagtcattgagctgcaggacgtggaatgcgaggagaggccccggggaagcagctccaactgagggtgattaaaatctgaagcaaagaggccaaagattggaaaccccccacccccacctctttccagaactgcttgaagagaactggttggagttatggaaaagatgccctgtgccaggacagcagttcattgttactgtaaccgattgtattattttgttaaatatttctataaatatttaagagatgtacacatgtgtaatataggaaggaaggatgtaaagtggtatgatctggggcttctccactcctgccccagagtgtggaggccacagtggggcctctccgtatttgtgcattgggctccgtgccacaaccaagcttcattagtcttaaatttcagcatatgttgctgctgcttaaatattgtataatttacttgtataattctatgcaaatattgcttatgtaataggattattttgtaaaggtttctgtttaaaatattttaaatttgcatatcacaaccctgtggtagtatgaaatgttactgttaactttcaaacacgctatgcgtgataatttttttgtttaatgagcagatatgaagaaagcacgttaatcctggtggcttctctaggtgtcgttgtgtgcggtcctcttgtttggctgtgcgtgtgaacacgtgtgtgagttcaccatgtactgtactgtgattttttttttgtcttgttttgtttctctacactgtctgtaacctgtagtaggctctgacctagtcaggctggaagcgtcaggatatcttttcttcgtgctggtgagggctggccctaaacatccacctaatcctttcaaatcagcccggcaaaagctagactctcctcgtgtctacggcatctcttatgatcattggctgccatccaggaccccaatttgtgcttcagggggataatctccttctctcggatcattgtgatggatgctggaacctcagggtatggagctcacatcagttcatcatggtgggtgttagagaattcggtgacatgcctagtgctgagccttggctgggccatgagagtctgtatactctaaaaagcatgcagcatggtgcccctcttctgaccaacacacacacgacccctcccccaacacccccaaattcaagagtggatgtggccctgtcacaggtagaaaaacctatttagttaattctttcttggcccacagtctcccagaaatgatgttttgagtccctatagtttaaactccctctcttaaatggagcagctggttgaggctttctagatctgtttgcatcttctttaaaactaagtggtgagcatgcattgtggtgtagaggcaggcattatgtaggataagagctccggggggattcttcatgcaccagtgtttagggtacgtgcttcctaagtaaatccaaacattgtctccatcctccccgtcattagtgctctttcaatgtgatgtgggaaagcaggaggatggacacaccccactgaaagatgtaggcaggggcaggtctctcaaccaggcatatttttaaaagttgcttctgtactggttctcttcttttgctctgaggtgtgggctccctcatctcgtaaccagagaccagcacatgtcagggaagcacccagtgtcggctccccatccaaatccacaccagcaccttgttacagacaagaagtcagaggaaagggcggggtccctgcagggctgaagcctaagctactgtgaggcgctcacgagtggcagctcctgttactcccttttaaattacctgggaaatcttaacagaaaggtaatgggcccccagaaatacccacagcatagtgacctcagaccctgatactcaccacaaaacttttaagatgctgattgggagccgcttgtggctgctgggtgtgtgtgtgtgtgtgtgcgtgcgtgcgtgtgtgtgtgtctctgctggggaccctggccacccccctgctgctgtcttggtgcctgtcacccacatggtctgccatcctaacacccagctctgctcagaaaacgtcctgcgtggaggagggatgatgcagaattctgaagtcgacttccctctggctcctggcgtgccctcgctcccttcctgagcccagctcgtgttgcgccggaggctgcgcggcccctgatttctgcatggtgtagaactttctccaatagtcacattggcaaagggagaactggggtgggcggggggtggggctggcagggaattagaatttctctctctcttttaatagttttattttgtctgtcctgtttgttcatttggatgttttaatttttaaaaaaaaaaaaactttgctgatatttataattttgtatcataagaatgttttcctctacagtatttgtcatgccagtttataacaaaaaaaaatgcagggattttatttctattggaaacattacagctatgttttacttttggacagaatttttatttgtatagagtgcttactaatgttaaatagttcagagtatataacatttacattaaggactcatggtaggttttagggtaaggagtttaaaggaaataaatattcaaactgggtctcattgccaattttggtggaaatgagtttgtgtcatttcaattacaaagataaaagtatgccatataatttatttatatgaagatttatttttgtagtgtacatagtagtcatcaagtcttttgacagaagtatatttttaaagaatttatatgtgatgaatccataatgtctggaactttgctgagacatgagtgggcacagttttcattgtaaattacagcaaggaaagaaaatgtttaacagtgttaagagagtcagagcagagtggatattcatgcgattatgaagtgtttattagttaccattggcgacctagcatgcttctcatttcaaaccttggaaggtgaaaatgtacaaactctctaaataattaatgttcaaacactgatagaaattctaacatgaataaaaaataatataacttgttggttatatctttgtttgtagaatgctttttttctttaaaatacttgggagagacagttagtgttggagccatcagaaactgttgtttcatcttgctgaccttgtgacactcttcttttttgctctatctgatggagagagttttaggttttcctcctttttgttttgtataaatagtgggtataagcatagctctgttacatggatgtattacaaagtgggggctgagcttttagtgtgatcatcacccaaatagtgtacattgtacccattaattaatttcttatcacctgaccctatttttgttttctcataccaagaaacttcctaagttaaccatcaaaattagtccttctgtcatctctcttagcatacttatttcccttatgtgatgcctaataatgagggaacataaataaagccaaattcaaagataaaaaaaaaaaaaa

SEQ ID NO: 470 - DNA, 7957 bp, Homo sapiens
gcgcccgccgtgtgagcagcagcagcggctggtctgtcaaccggagcccgagcccgagcagcctgcggccagcagcgtcctcgcaagccgagcgcccaggcgcgccaggagcccgcagcagcggcagcagcgcgccgggccgcccgggaagcctccgtccccgcggcggcggcggcggcggcggcaacatggcctcggctggtaacgccgccgagccccaggaccgcggcggcggcggcagcggctgtatcggtgccccgggacggccggctggaggcgggaggcgcagacggacgggggggctgcgccgtgctgccgcgccggaccgggactatctgcaccggcccagctactgcgacgccgccttcgctctggagcagatttccaaggggaaggctactggccggaaagcgccgctgtggctgagagcgaagtttcagagactcttatttaaactgggttgttacattcaaaaaaactgcggcaagttcttggttgtgggcctcctcatatttggggccttcgcggtgggattaaaagcagcgaacctcgagaccaacgtggaggagctgtgggtggaagttggaggacgagtaagtcgtgaattaaattatactcgccagaagattggagaagaggctatgtttaatcctcaactcatgatacagacccctaaagaagaaggtgctaatgtcctgaccacagaagcgctcctacaacacctggactcggcactccaggccagccgtgtccatgtatacatgtacaacaggcagtggaaattggaacatttgtgttacaaatcaggagagcttatcacagaaacaggttacatggatcagataatagaatatctttacccttgtttgattattacacctttggactgcttctgggaaggggcgaaattacagtctgggacagcatacctcctaggtaaacctcctttgcggtggacaaacttcgaccctttggaattcctggaagagttaaagaaaataaactatcaagtggacagctgggaggaaatgctgaataaggctgaggttggtcatggttacatggaccgcccctgcctcaatccggccgatccagactgccccgccacagcccccaacaaaaattcaaccaaacctcttgatatggcccttgttttgaatggtggatgtcatggcttatccagaaagtatatgcactggcaggaggagttgattgtgggtggcacagtcaagaacagcactggaaaactcgtcagcgcccatgccctgcagaccatgttccagttaatgactcccaagcaaatgtacgagcacttcaaggggtacgagtatgtctcacacatcaactggaacgaggacaaagcggcagccatcctggaggcctggcagaggacatatgtggaggtggttcatcagagtgtcgcacagaactccactcaaaaggtgctttccttcaccaccacgaccctggacgacatcctgaaatccttctctgacgtcagtgtcatccgcgtggccagcggctacttactcatgctcgcctatgcctgtctaaccatgctgcgctgggactgctccaagtcccagggtgccgtggggctggctggcgtcctgctggttgcactgtcagtggctgcaggactgggcctgtgctcattgatcggaatttcctttaacgctgcaacaactcaggttttgccatttctcgctcttggtgttggtgtggatgatgtttttcttctggcccacgccttcagtgaaacaggacagaataaaagaatcccttttgaggacaggaccggggagtgcctgaagcgcacaggagccagcgtggccctcacgtccatcagcaatgtcacagccttcttcatggccgcgttaatcccaattcccgctctgcgggcgttctccctccaggcagcggtagtagtggtgttcaattttgccatggttctgctcatttttcctgcaattctcagcatggatttatatcgacgcgaggacaggagactggatattttctgctgttttacaagcccctgcgtcagcagagtgattcaggttgaacctcaggcctacaccgacacacacgacaatacccgctacagccccccacctccctacagcagccacagctttgcccatgaaacgcagattaccatgcagtccactgtccagctccgcacggagtacgacccccacacgcacgtgtactacaccaccgctgagccgcgctccgagatctctgtgcagcccgtcaccgtgacacaggacaccctcagctgccagagcccagagagcaccagctccacaagggacctgctctcccagttctccgactccagcctccactgcctcgagcccccctgtacgaagtggacactctcatcttttgctgagaagcactatgctcctttcctcttgaaaccaaaagccaaggtagtggtgatcttcctttttctgggcttgctgggggtcagcctttatggcaccacccgagtgagagacgggctggaccttacggacattgtacctcgggaaaccagagaatatgactttattgctgcacaattcaaatacttttctttctacaacatgtatatagtcacccagaaagcagactacccgaatatccagcacttactttacgacctacacaggagtttcagtaacgtgaagtatgtcatgttggaagaaaacaaacagcttcccaaaatgtggctgcactacttcagagactggcttcagggacttcaggatgcatttgacagtgactgggaaaccgggaaaatcatgccaaacaattacaagaatggatcagacgatggagtccttgcctacaaactcctggtgcaaaccggcagccgcgataagcccatcgacatcagccagttgactaaacagcgtctggtggatgcagatggcatcattaatcccagcgctttctacatctacctgacggcttgggtcagcaacgaccccgtcgcgtatgctgcctcccaggccaacatccggccacaccgaccagaatgggtccacgacaaagccgactacatgcctgaaacaaggctgagaatcccggcagcagagcccatcgagtatgcccagttccctttctacctcaacggcttgcgggacacctcagactttgtggaggcaattgaaaaagtaaggaccatctgcagcaactatacgagcctggggctgtccagttaccccaacggctaccccttcctcttctgggagcagtacatcggcctccgccactggctgctgctgttcatcagcgtggtgttggcctgcacattcctcgtgtgcgctgtcttccttctgaacccctggacggccgggatcattgtgatggtcctggcgctgatgacggtcgagctgttcggcatgatgggcctcatcggaatcaagctcagtgccgtgcccgtggtcatcctgatcgcttctgttggcataggagtggagttcaccgttcacgttgctttggcctttctgacggccatcggcgacaagaaccgcagggctgtgcttgccctggagcacatgtttgcacccgtcctggatggcgccgtgtccactctgctgggagtgctgatgctggcgggatctgagttcgacttcattgtcaggtatttctttgctgtgctggcgatcctcaccatcctcggcgttctcaatgggctggttttgcttcccgtgcttttgtctttctttggaccatatcctgaggtgtctccagccaacggcttgaaccgcctgcccacaccctcccctgagccaccccccagcgtggtccgcttcgccatgccgcccggccacacgcacagcgggtctgattcctccgactcggagtatagttcccagacgacagtgtcaggcctcagcgaggagcttcggcactacgaggcccagcagggcgcgggaggccctgcccaccaagtgatcgtggaagccacagaaaaccccgtcttcgcccactccactgtggtccatcccgaatccaggcatcacccaccctcgaacccgagacagcagccccacctggactcagggtccctgcctcccggacggcaaggccagcagccccgcagggacccccccagagaaggcttgtggccacccccctacagaccgcgcagagacgcttttgaaatttctactgaagggcattctggccctagcaatagggcccgctggggccctcgcggggcccgttctcacaaccctcggaacccagcgtccactgccatgggcagctccgtgcccggctactgccagcccatcaccactgtgacggcttctgcctccgtgactgtcgccgtgcacccgccgcctgtccctgggcctgggcggaacccccgagggggactctgcccaggctaccctgagactgaccacggcctgtttgaggacccccacgtgcctttccacgtccggtgtgagaggagggattcgaaggtggaagtcattgagctgcaggacgtggaatgcgaggagaggccccggggaagcagctccaactgagggtgattaaaatctgaagcaaagaggccaaagattggaaaccccccacccccacctctttccagaactgcttgaagagaactggttggagttatggaaaagatgccctgtgccaggacagcagttcattgttactgtaaccgattgtattattttgttaaatatttctataaatatttaagagatgtacacatgtgtaatataggaaggaaggatgtaaagtggtatgatctggggcttctccactcctgccccagagtgtggaggccacagtggggcctctccgtatttgtgcattgggctccgtgccacaaccaagcttcattagtcttaaatttcagcatatgttgctgctgcttaaatattgtataatttacttgtataattctatgcaaatattgcttatgtaataggattattttgtaaaggtttctgtttaaaatattttaaatttgcatatcacaaccctgtggtagtatgaaatgttactgttaactttcaaacacgctatgcgtgataatttttttgtttaatgagcagatatgaagaaagcacgttaatcctggtggcttctctaggtgtcgttgtgtgcggtcctcttgtttggctgtgcgtgtgaacacgtgtgtgagttcaccatgtactgtactgtgattttttttttgtcttgttttgtttctctacactgtctgtaacctgtagtaggctctgacctagtcaggctggaagcgtcaggatatcttttcttcgtgctggtgagggctggccctaaacatccacctaatcctttcaaatcagcccggcaaaagctagactctcctcgtgtctacggcatctcttatgatcattggctgccatccaggaccccaatttgtgcttcagggggataatctccttctctcggatcattgtgatggatgctggaacctcagggtatggagctcacatcagttcatcatggtgggtgttagagaattcggtgacatgcctagtgctgagccttggctgggccatgagagtctgtatactctaaaaagcatgcagcatggtgcccctcttctgaccaacacacacacgacccctcccccaacacccccaaattcaagagtggatgtggccctgtcacaggtagaaaaacctatttagttaattctttcttggcccacagtctcccagaaatgatgttttgagtccctatagtttaaactccctctcttaaatggagcagctggttgaggctttctagatctgtttgcatcttctttaaaactaagtggtgagcatgcattgtggtgtagaggcaggcattatgtaggataagagctccggggggattcttcatgcaccagtgtttagggtacgtgcttcctaagtaaatccaaacattgtctccatcctccccgtcattagtgctctttcaatgtgatgtgggaaagcaggaggatggacacaccccactgaaagatgtaggcaggggcaggtctctcaaccaggcatatttttaaaagttgcttctgtactggttctcttcttttgctctgaggtgtgggctccctcatctcgtaaccagagaccagcacatgtcagggaagcacccagtgtcggctccccatccaaatccacaccagcaccttgttacagacaagaagtcagaggaaagggcggggtccctgcagggctgaagcctaagctactgtgaggcgctcacgagtggcagctcctgttactcccttttaaattacctgggaaatcttaacagaaaggtaatgggcccccagaaatacccacagcatagtgacctcagaccctgatactcaccacaaaacttttaagatgctgattgggagccgcttgtggctgctgggtgtgtgtgtgtgtgtgtgcgtgcgtgcgtgtgtgtgtgtctctgctggggaccctggccacccccctgctgctgtcttggtgcctgtcacccacatggtctgccatcctaacacccagctctgctcagaaaacgtcctgcgtggaggagggatgatgcagaattctgaagtcgacttccctctggctcctggcgtgccctcgctcccttcctgagcccagctcgtgttgcgccggaggctgcgcggcccctgatttctgcatggtgtagaactttctccaatagtcacattggcaaagggagaactggggtgggcggggggtggggctggcagggaattagaatttctctctctcttttaatagttttattttgtctgtcctgtttgttcatttggatgttttaatttttaaaaaaaaaaaaactttgctgatatttataattttgtatcataagaatgttttcctctacagtatttgtcatgccagtttataacaaaaaaaaatgcagggattttatttctattggaaacattacagctatgttttacttttggacagaatttttatttgtatagagtgcttactaatgttaaatagttcagagtatataacatttacattaaggactcatggtaggttttagggtaaggagtttaaaggaaataaatattcaaactgggtctcattgccaattttggtggaaatgagtttgtgtcatttcaattacaaagataaaagtatgccatataatttatttatatgaagatttatttttgtagtgtacatagtagtcatcaagtcttttgacagaagtatatttttaaagaatttatatgtgatgaatccataatgtctggaactttgctgagacatgagtgggcacagttttcattgtaaattacagcaaggaaagaaaatgtttaacagtgttaagagagtcagagcagagtggatattcatgcgattatgaagtgtttattagttaccattggcgacctagcatgcttctcatttcaaaccttggaaggtgaaaatgtacaaactctctaaataattaatgttcaaacactgatagaaattctaacatgaataaaaaataatataacttgttggttatatctttgtttgtagaatgctttttttctttaaaatacttgggagagacagttagtgttggagccatcagaaactgttgtttcatcttgctgaccttgtgacactcttcttttttgctctatctgatggagagagttttaggttttcctcctttttgttttgtataaatagtgggtataagcatagctctgttacatggatgtattacaaagtgggggctgagcttttagtgtgatcatcacccaaatagtgtacattgtacccattaattaatttcttatcacctgaccctatttttgttttctcataccaagaaacttcctaagttaaccatcaaaattagtccttctgtcatctctcttagcatacttatttcccttatgtgatgcctaataatgagggaacataaataaagccaaattcaaagataaaaaaaaaaaaaa

SEQ ID NO: 471 - DNA, 7675 bp, Homo sapiens
actcacacctctccaggaaaagcagcagacaaatggggattgaaaaattcaaaccctccctctggtcctgggaggaaagggctgtctgaggtccgcagggggtggaggggaaggctactggccggaaagcgccgctgtggctgagagcgaagtttcagagactcttatttaaactgggttgttacattcaaaaaaactgcggcaagttcttggttgtgggcctcctcatatttggggccttcgcggtgggattaaaagcagcgaacctcgagaccaacgtggaggagctgtgggtggaagttggaggacgagtaagtcgtgaattaaattatactcgccagaagattggagaagaggctatgtttaatcctcaactcatgatacagacccctaaagaagaaggtgctaatgtcctgaccacagaagcgctcctacaacacctggactcggcactccaggccagccgtgtccatgtatacatgtacaacaggcagtggaaattggaacatttgtgttacaaatcaggagagcttatcacagaaacaggttacatggatcagataatagaatatctttacccttgtttgattattacacctttggactgcttctgggaaggggcgaaattacagtctgggacagcatacctcctaggtaaacctcctttgcggtggacaaacttcgaccctttggaattcctggaagagttaaagaaaataaactatcaagtggacagctgggaggaaatgctgaataaggctgaggttggtcatggttacatggaccgcccctgcctcaatccggccgatccagactgccccgccacagcccccaacaaaaattcaaccaaacctcttgatatggcccttgttttgaatggtggatgtcatggcttatccagaaagtatatgcactggcaggaggagttgattgtgggtggcacagtcaagaacagcactggaaaactcgtcagcgcccatgccctgcagaccatgttccagttaatgactcccaagcaaatgtacgagcacttcaaggggtacgagtatgtctcacacatcaactggaacgaggacaaagcggcagccatcctggaggcctggcagaggacatatgtggaggtggttcatcagagtgtcgcacagaactccactcaaaaggtgctttccttcaccaccacgaccctggacgacatcctgaaatccttctctgacgtcagtgtcatccgcgtggccagcggctacttactcatgctcgcctatgcctgtctaaccatgctgcgctgggactgctccaagtcccagggtgccgtggggctggctggcgtcctgctggttgcactgtcagtggctgcaggactgggcctgtgctcattgatcggaatttcctttaacgctgcaacaactcaggttttgccatttctcgctcttggtgttggtgtggatgatgtttttcttctggcccacgccttcagtgaaacaggacagaataaaagaatcccttttgaggacaggaccggggagtgcctgaagcgcacaggagccagcgtggccctcacgtccatcagcaatgtcacagccttcttcatggccgcgttaatcccaattcccgctctgcgggcgttctccctccaggcagcggtagtagtggtgttcaattttgccatggttctgctcatttttcctgcaattctcagcatggatttatatcgacgcgaggacaggagactggatattttctgctgttttacaagcccctgcgtcagcagagtgattcaggttgaacctcaggcctacaccgacacacacgacaatacccgctacagccccccacctccctacagcagccacagctttgcccatgaaacgcagattaccatgcagtccactgtccagctccgcacggagtacgacccccacacgcacgtgtactacaccaccgctgagccgcgctccgagatctctgtgcagcccgtcaccgtgacacaggacaccctcagctgccagagcccagagagcaccagctccacaagggacctgctctcccagttctccgactccagcctccactgcctcgagcccccctgtacgaagtggacactctcatcttttgctgagaagcactatgctcctttcctcttgaaaccaaaagccaaggtagtggtgatcttcctttttctgggcttgctgggggtcagcctttatggcaccacccgagtgagagacgggctggaccttacggacattgtacctcgggaaaccagagaatatgactttattgctgcacaattcaaatacttttctttctacaacatgtatatagtcacccagaaagcagactacccgaatatccagcacttactttacgacctacacaggagtttcagtaacgtgaagtatgtcatgttggaagaaaacaaacagcttcccaaaatgtggctgcactacttcagagactggcttcagggacttcaggatgcatttgacagtgactgggaaaccgggaaaatcatgccaaacaattacaagaatggatcagacgatggagtccttgcctacaaactcctggtgcaaaccggcagccgcgataagcccatcgacatcagccagttgactaaacagcgtctggtggatgcagatggcatcattaatcccagcgctttctacatctacctgacggcttgggtcagcaacgaccccgtcgcgtatgctgcctcccaggccaacatccggccacaccgaccagaatgggtccacgacaaagccgactacatgcctgaaacaaggctgagaatcccggcagcagagcccatcgagtatgcccagttccctttctacctcaacggcttgcgggacacctcagactttgtggaggcaattgaaaaagtaaggaccatctgcagcaactatacgagcctggggctgtccagttaccccaacggctaccccttcctcttctgggagcagtacatcggcctccgccactggctgctgctgttcatcagcgtggtgttggcctgcacattcctcgtgtgcgctgtcttccttctgaacccctggacggccgggatcattgtgatggtcctggcgctgatgacggtcgagctgttcggcatgatgggcctcatcggaatcaagctcagtgccgtgcccgtggtcatcctgatcgcttctgttggcataggagtggagttcaccgttcacgttgctttggcctttctgacggccatcggcgacaagaaccgcagggctgtgcttgccctggagcacatgtttgcacccgtcctggatggcgccgtgtccactctgctgggagtgctgatgctggcgggatctgagttcgacttcattgtcaggtatttctttgctgtgctggcgatcctcaccatcctcggcgttctcaatgggctggttttgcttcccgtgcttttgtctttctttggaccatatcctgaggtgtctccagccaacggcttgaaccgcctgcccacaccctcccctgagccaccccccagcgtggtccgcttcgccatgccgcccggccacacgcacagcgggtctgattcctccgactcggagtatagttcccagacgacagtgtcaggcctcagcgaggagcttcggcactacgaggcccagcagggcgcgggaggccctgcccaccaagtgatcgtggaagccacagaaaaccccgtcttcgcccactccactgtggtccatcccgaatccaggcatcacccaccctcgaacccgagacagcagccccacctggactcagggtccctgcctcccggacggcaaggccagcagccccgcagggacccccccagagaaggcttgtggccacccccctacagaccgcgcagagacgcttttgaaatttctactgaagggcattctggccctagcaatagggcccgctggggccctcgcggggcccgttctcacaaccctcggaacccagcgtccactgccatgggcagctccgtgcccggctactgccagcccatcaccactgtgacggcttctgcctccgtgactgtcgccgtgcacccgccgcctgtccctgggcctgggcggaacccccgagggggactctgcccaggctaccctgagactgaccacggcctgtttgaggacccccacgtgcctttccacgtccggtgtgagaggagggattcgaaggtggaagtcattgagctgcaggacgtggaatgcgaggagaggccccggggaagcagctccaactgagggtgattaaaatctgaagcaaagaggccaaagattggaaaccccccacccccacctctttccagaactgcttgaagagaactggttggagttatggaaaagatgccctgtgccaggacagcagttcattgttactgtaaccgattgtattattttgttaaatatttctataaatatttaagagatgtacacatgtgtaatataggaaggaaggatgtaaagtggtatgatctggggcttctccactcctgccccagagtgtggaggccacagtggggcctctccgtatttgtgcattgggctccgtgccacaaccaagcttcattagtcttaaatttcagcatatgttgctgctgcttaaatattgtataatttacttgtataattctatgcaaatattgcttatgtaataggattattttgtaaaggtttctgtttaaaatattttaaatttgcatatcacaaccctgtggtagtatgaaatgttactgttaactttcaaacacgctatgcgtgataatttttttgtttaatgagcagatatgaagaaagcacgttaatcctggtggcttctctaggtgtcgttgtgtgcggtcctcttgtttggctgtgcgtgtgaacacgtgtgtgagttcaccatgtactgtactgtgattttttttttgtcttgttttgtttctctacactgtctgtaacctgtagtaggctctgacctagtcaggctggaagcgtcaggatatcttttcttcgtgctggtgagggctggccctaaacatccacctaatcctttcaaatcagcccggcaaaagctagactctcctcgtgtctacggcatctcttatgatcattggctgccatccaggaccccaatttgtgcttcagggggataatctccttctctcggatcattgtgatggatgctggaacctcagggtatggagctcacatcagttcatcatggtgggtgttagagaattcggtgacatgcctagtgctgagccttggctgggccatgagagtctgtatactctaaaaagcatgcagcatggtgcccctcttctgaccaacacacacacgacccctcccccaacacccccaaattcaagagtggatgtggccctgtcacaggtagaaaaacctatttagttaattctttcttggcccacagtctcccagaaatgatgttttgagtccctatagtttaaactccctctcttaaatggagcagctggttgaggctttctagatctgtttgcatcttctttaaaactaagtggtgagcatgcattgtggtgtagaggcaggcattatgtaggataagagctccggggggattcttcatgcaccagtgtttagggtacgtgcttcctaagtaaatccaaacattgtctccatcctccccgtcattagtgctctttcaatgtgatgtgggaaagcaggaggatggacacaccccactgaaagatgtaggcaggggcaggtctctcaaccaggcatatttttaaaagttgcttctgtactggttctcttcttttgctctgaggtgtgggctccctcatctcgtaaccagagaccagcacatgtcagggaagcacccagtgtcggctccccatccaaatccacaccagcaccttgttacagacaagaagtcagaggaaagggcggggtccctgcagggctgaagcctaagctactgtgaggcgctcacgagtggcagctcctgttactcccttttaaattacctgggaaatcttaacagaaaggtaatgggcccccagaaatacccacagcatagtgacctcagaccctgatactcaccacaaaacttttaagatgctgattgggagccgcttgtggctgctgggtgtgtgtgtgtgtgtgtgcgtgcgtgcgtgtgtgtgtgtctctgctggggaccctggccacccccctgctgctgtcttggtgcctgtcacccacatggtctgccatcctaacacccagctctgctcagaaaacgtcctgcgtggaggagggatgatgcagaattctgaagtcgacttccctctggctcctggcgtgccctcgctcccttcctgagcccagctcgtgttgcgccggaggctgcgcggcccctgatttctgcatggtgtagaactttctccaatagtcacattggcaaagggagaactggggtgggcggggggtggggctggcagggaattagaatttctctctctcttttaatagttttattttgtctgtcctgtttgttcatttggatgttttaatttttaaaaaaaaaaaaactttgctgatatttataattttgtatcataagaatgttttcctctacagtatttgtcatgccagtttataacaaaaaaaaatgcagggattttatttctattggaaacattacagctatgttttacttttggacagaatttttatttgtatagagtgcttactaatgttaaatagttcagagtatataacatttacattaaggactcatggtaggttttagggtaaggagtttaaaggaaataaatattcaaactgggtctcattgccaattttggtggaaatgagtttgtgtcatttcaattacaaagataaaagtatgccatataatttatttatatgaagatttatttttgtagtgtacatagtagtcatcaagtcttttgacagaagtatatttttaaagaatttatatgtgatgaatccataatgtctggaactttgctgagacatgagtgggcacagttttcattgtaaattacagcaaggaaagaaaatgtttaacagtgttaagagagtcagagcagagtggatattcatgcgattatgaagtgtttattagttaccattggcgacctagcatgcttctcatttcaaaccttggaaggtgaaaatgtacaaactctctaaataattaatgttcaaacactgatagaaattctaacatgaataaaaaataatataacttgttggttatatctttgtttgtagaatgctttttttctttaaaatacttgggagagacagttagtgttggagccatcagaaactgttgtttcatcttgctgaccttgtgacactcttcttttttgctctatctgatggagagagttttaggttttcctcctttttgttttgtataaatagtgggtataagcatagctctgttacatggatgtattacaaagtgggggctgagcttttagtgtgatcatcacccaaatagtgtacattgtacccattaattaatttcttatcacctgaccctatttttgttttctcataccaagaaacttcctaagttaaccatcaaaattagtccttctgtcatctctcttagcatacttatttcccttatgtgatgcctaataatgagggaacataaataaagccaaattcaaagataaaaaaaaaaaaaa

SEQ ID NO: 472 - DNA, 7658 bp, Homo sapiens
actcacacctctccaggaaaagcagcagacaaatggggattgaaaaattcaaaccctccctctggtcctgggaggaaagggctgtctgaggggaaggctactggccggaaagcgccgctgtggctgagagcgaagtttcagagactcttatttaaactgggttgttacattcaaaaaaactgcggcaagttcttggttgtgggcctcctcatatttggggccttcgcggtgggattaaaagcagcgaacctcgagaccaacgtggaggagctgtgggtggaagttggaggacgagtaagtcgtgaattaaattatactcgccagaagattggagaagaggctatgtttaatcctcaactcatgatacagacccctaaagaagaaggtgctaatgtcctgaccacagaagcgctcctacaacacctggactcggcactccaggccagccgtgtccatgtatacatgtacaacaggcagtggaaattggaacatttgtgttacaaatcaggagagcttatcacagaaacaggttacatggatcagataatagaatatctttacccttgtttgattattacacctttggactgcttctgggaaggggcgaaattacagtctgggacagcatacctcctaggtaaacctcctttgcggtggacaaacttcgaccctttggaattcctggaagagttaaagaaaataaactatcaagtggacagctgggaggaaatgctgaataaggctgaggttggtcatggttacatggaccgcccctgcctcaatccggccgatccagactgccccgccacagcccccaacaaaaattcaaccaaacctcttgatatggcccttgttttgaatggtggatgtcatggcttatccagaaagtatatgcactggcaggaggagttgattgtgggtggcacagtcaagaacagcactggaaaactcgtcagcgcccatgccctgcagaccatgttccagttaatgactcccaagcaaatgtacgagcacttcaaggggtacgagtatgtctcacacatcaactggaacgaggacaaagcggcagccatcctggaggcctggcagaggacatatgtggaggtggttcatcagagtgtcgcacagaactccactcaaaaggtgctttccttcaccaccacgaccctggacgacatcctgaaatccttctctgacgtcagtgtcatccgcgtggccagcggctacttactcatgctcgcctatgcctgtctaaccatgctgcgctgggactgctccaagtcccagggtgccgtggggctggctggcgtcctgctggttgcactgtcagtggctgcaggactgggcctgtgctcattgatcggaatttcctttaacgctgcaacaactcaggttttgccatttctcgctcttggtgttggtgtggatgatgtttttcttctggcccacgccttcagtgaaacaggacagaataaaagaatcccttttgaggacaggaccggggagtgcctgaagcgcacaggagccagcgtggccctcacgtccatcagcaatgtcacagccttcttcatggccgcgttaatcccaattcccgctctgcgggcgttctccctccaggcagcggtagtagtggtgttcaattttgccatggttctgctcatttttcctgcaattctcagcatggatttatatcgacgcgaggacaggagactggatattttctgctgttttacaagcccctgcgtcagcagagtgattcaggttgaacctcaggcctacaccgacacacacgacaatacccgctacagccccccacctccctacagcagccacagctttgcccatgaaacgcagattaccatgcagtccactgtccagctccgcacggagtacgacccccacacgcacgtgtactacaccaccgctgagccgcgctccgagatctctgtgcagcccgtcaccgtgacacaggacaccctcagctgccagagcccagagagcaccagctccacaagggacctgctctcccagttctccgactccagcctccactgcctcgagcccccctgtacgaagtggacactctcatcttttgctgagaagcactatgctcctttcctcttgaaaccaaaagccaaggtagtggtgatcttcctttttctgggcttgctgggggtcagcctttatggcaccacccgagtgagagacgggctggaccttacggacattgtacctcgggaaaccagagaatatgactttattgctgcacaattcaaatacttttctttctacaacatgtatatagtcacccagaaagcagactacccgaatatccagcacttactttacgacctacacaggagtttcagtaacgtgaagtatgtcatgttggaagaaaacaaacagcttcccaaaatgtggctgcactacttcagagactggcttcagggacttcaggatgcatttgacagtgactgggaaaccgggaaaatcatgccaaacaattacaagaatggatcagacgatggagtccttgcctacaaactcctggtgcaaaccggcagccgcgataagcccatcgacatcagccagttgactaaacagcgtctggtggatgcagatggcatcattaatcccagcgctttctacatctacctgacggcttgggtcagcaacgaccccgtcgcgtatgctgcctcccaggccaacatccggccacaccgaccagaatgggtccacgacaaagccgactacatgcctgaaacaaggctgagaatcccggcagcagagcccatcgagtatgcccagttccctttctacctcaacggcttgcgggacacctcagactttgtggaggcaattgaaaaagtaaggaccatctgcagcaactatacgagcctggggctgtccagttaccccaacggctaccccttcctcttctgggagcagtacatcggcctccgccactggctgctgctgttcatcagcgtggtgttggcctgcacattcctcgtgtgcgctgtcttccttctgaacccctggacggccgggatcattgtgatggtcctggcgctgatgacggtcgagctgttcggcatgatgggcctcatcggaatcaagctcagtgccgtgcccgtggtcatcctgatcgcttctgttggcataggagtggagttcaccgttcacgttgctttggcctttctgacggccatcggcgacaagaaccgcagggctgtgcttgccctggagcacatgtttgcacccgtcctggatggcgccgtgtccactctgctgggagtgctgatgctggcgggatctgagttcgacttcattgtcaggtatttctttgctgtgctggcgatcctcaccatcctcggcgttctcaatgggctggttttgcttcccgtgcttttgtctttctttggaccatatcctgaggtgtctccagccaacggcttgaaccgcctgcccacaccctcccctgagccaccccccagcgtggtccgcttcgccatgccgcccggccacacgcacagcgggtctgattcctccgactcggagtatagttcccagacgacagtgtcaggcctcagcgaggagcttcggcactacgaggcccagcagggcgcgggaggccctgcccaccaagtgatcgtggaagccacagaaaaccccgtcttcgcccactccactgtggtccatcccgaatccaggcatcacccaccctcgaacccgagacagcagccccacctggactcagggtccctgcctcccggacggcaaggccagcagccccgcagggacccccccagagaaggcttgtggccacccccctacagaccgcgcagagacgcttttgaaatttctactgaagggcattctggccctagcaatagggcccgctggggccctcgcggggcccgttctcacaaccctcggaacccagcgtccactgccatgggcagctccgtgcccggctactgccagcccatcaccactgtgacggcttctgcctccgtgactgtcgccgtgcacccgccgcctgtccctgggcctgggcggaacccccgagggggactctgcccaggctaccctgagactgaccacggcctgtttgaggacccccacgtgcctttccacgtccggtgtgagaggagggattcgaaggtggaagtcattgagctgcaggacgtggaatgcgaggagaggccccggggaagcagctccaactgagggtgattaaaatctgaagcaaagaggccaaagattggaaaccccccacccccacctctttccagaactgcttgaagagaactggttggagttatggaaaagatgccctgtgccaggacagcagttcattgttactgtaaccgattgtattattttgttaaatatttctataaatatttaagagatgtacacatgtgtaatataggaaggaaggatgtaaagtggtatgatctggggcttctccactcctgccccagagtgtggaggccacagtggggcctctccgtatttgtgcattgggctccgtgccacaaccaagcttcattagtcttaaatttcagcatatgttgctgctgcttaaatattgtataatttacttgtataattctatgcaaatattgcttatgtaataggattattttgtaaaggtttctgtttaaaatattttaaatttgcatatcacaaccctgtggtagtatgaaatgttactgttaactttcaaacacgctatgcgtgataatttttttgtttaatgagcagatatgaagaaagcacgttaatcctggtggcttctctaggtgtcgttgtgtgcggtcctcttgtttggctgtgcgtgtgaacacgtgtgtgagttcaccatgtactgtactgtgattttttttttgtcttgttttgtttctctacactgtctgtaacctgtagtaggctctgacctagtcaggctggaagcgtcaggatatcttttcttcgtgctggtgagggctggccctaaacatccacctaatcctttcaaatcagcccggcaaaagctagactctcctcgtgtctacggcatctcttatgatcattggctgccatccaggaccccaatttgtgcttcagggggataatctccttctctcggatcattgtgatggatgctggaacctcagggtatggagctcacatcagttcatcatggtgggtgttagagaattcggtgacatgcctagtgctgagccttggctgggccatgagagtctgtatactctaaaaagcatgcagcatggtgcccctcttctgaccaacacacacacgacccctcccccaacacccccaaattcaagagtggatgtggccctgtcacaggtagaaaaacctatttagttaattctttcttggcccacagtctcccagaaatgatgttttgagtccctatagtttaaactccctctcttaaatggagcagctggttgaggctttctagatctgtttgcatcttctttaaaactaagtggtgagcatgcattgtggtgtagaggcaggcattatgtaggataagagctccggggggattcttcatgcaccagtgtttagggtacgtgcttcctaagtaaatccaaacattgtctccatcctccccgtcattagtgctctttcaatgtgatgtgggaaagcaggaggatggacacaccccactgaaagatgtaggcaggggcaggtctctcaaccaggcatatttttaaaagttgcttctgtactggttctcttcttttgctctgaggtgtgggctccctcatctcgtaaccagagaccagcacatgtcagggaagcacccagtgtcggctccccatccaaatccacaccagcaccttgttacagacaagaagtcagaggaaagggcggggtccctgcagggctgaagcctaagctactgtgaggcgctcacgagtggcagctcctgttactcccttttaaattacctgggaaatcttaacagaaaggtaatgggcccccagaaatacccacagcatagtgacctcagaccctgatactcaccacaaaacttttaagatgctgattgggagccgcttgtggctgctgggtgtgtgtgtgtgtgtgtgcgtgcgtgcgtgtgtgtgtgtctctgctggggaccctggccacccccctgctgctgtcttggtgcctgtcacccacatggtctgccatcctaacacccagctctgctcagaaaacgtcctgcgtggaggagggatgatgcagaattctgaagtcgacttccctctggctcctggcgtgccctcgctcccttcctgagcccagctcgtgttgcgccggaggctgcgcggcccctgatttctgcatggtgtagaactttctccaatagtcacattggcaaagggagaactggggtgggcggggggtggggctggcagggaattagaatttctctctctcttttaatagttttattttgtctgtcctgtttgttcatttggatgttttaatttttaaaaaaaaaaaaactttgctgatatttataattttgtatcataagaatgttttcctctacagtatttgtcatgccagtttataacaaaaaaaaatgcagggattttatttctattggaaacattacagctatgttttacttttggacagaatttttatttgtatagagtgcttactaatgttaaatagttcagagtatataacatttacattaaggactcatggtaggttttagggtaaggagtttaaaggaaataaatattcaaactgggtctcattgccaattttggtggaaatgagtttgtgtcatttcaattacaaagataaaagtatgccatataatttatttatatgaagatttatttttgtagtgtacatagtagtcatcaagtcttttgacagaagtatatttttaaagaatttatatgtgatgaatccataatgtctggaactttgctgagacatgagtgggcacagttttcattgtaaattacagcaaggaaagaaaatgtttaacagtgttaagagagtcagagcagagtggatattcatgcgattatgaagtgtttattagttaccattggcgacctagcatgcttctcatttcaaaccttggaaggtgaaaatgtacaaactctctaaataattaatgttcaaacactgatagaaattctaacatgaataaaaaataatataacttgttggttatatctttgtttgtagaatgctttttttctttaaaatacttgggagagacagttagtgttggagccatcagaaactgttgtttcatcttgctgaccttgtgacactcttcttttttgctctatctgatggagagagttttaggttttcctcctttttgttttgtataaatagtgggtataagcatagctctgttacatggatgtattacaaagtgggggctgagcttttagtgtgatcatcacccaaatagtgtacattgtacccattaattaatttcttatcacctgaccctatttttgttttctcataccaagaaacttcctaagttaaccatcaaaattagtccttctgtcatctctcttagcatacttatttcccttatgtgatgcctaataatgagggaacataaataaagccaaattcaaagataaaaaaaaaaaaaa

SEQ ID NO: 473 - DNA, 7757 bp, Homo sapiens
gaaggcgagcacccagacgggggcccgccggggccgcggccagcgccggggaaatgccgcgccggggagcagcctgcgccggcctgagcccttccctttgcactcggctgttttttacgtttaaccagaaaggaagggagaggagggaaagatccatgtggctgccctcttccgatcacaaatattgtcgggaaggctactggccggaaagcgccgctgtggctgagagcgaagtttcagagactcttatttaaactgggttgttacattcaaaaaaactgcggcaagttcttggttgtgggcctcctcatatttggggccttcgcggtgggattaaaagcagcgaacctcgagaccaacgtggaggagctgtgggtggaagttggaggacgagtaagtcgtgaattaaattatactcgccagaagattggagaagaggctatgtttaatcctcaactcatgatacagacccctaaagaagaaggtgctaatgtcctgaccacagaagcgctcctacaacacctggactcggcactccaggccagccgtgtccatgtatacatgtacaacaggcagtggaaattggaacatttgtgttacaaatcaggagagcttatcacagaaacaggttacatggatcagataatagaatatctttacccttgtttgattattacacctttggactgcttctgggaaggggcgaaattacagtctgggacagcatacctcctaggtaaacctcctttgcggtggacaaacttcgaccctttggaattcctggaagagttaaagaaaataaactatcaagtggacagctgggaggaaatgctgaataaggctgaggttggtcatggttacatggaccgcccctgcctcaatccggccgatccagactgccccgccacagcccccaacaaaaattcaaccaaacctcttgatatggcccttgttttgaatggtggatgtcatggcttatccagaaagtatatgcactggcaggaggagttgattgtgggtggcacagtcaagaacagcactggaaaactcgtcagcgcccatgccctgcagaccatgttccagttaatgactcccaagcaaatgtacgagcacttcaaggggtacgagtatgtctcacacatcaactggaacgaggacaaagcggcagccatcctggaggcctggcagaggacatatgtggaggtggttcatcagagtgtcgcacagaactccactcaaaaggtgctttccttcaccaccacgaccctggacgacatcctgaaatccttctctgacgtcagtgtcatccgcgtggccagcggctacttactcatgctcgcctatgcctgtctaaccatgctgcgctgggactgctccaagtcccagggtgccgtggggctggctggcgtcctgctggttgcactgtcagtggctgcaggactgggcctgtgctcattgatcggaatttcctttaacgctgcaacaactcaggttttgccatttctcgctcttggtgttggtgtggatgatgtttttcttctggcccacgccttcagtgaaacaggacagaataaaagaatcccttttgaggacaggaccggggagtgcctgaagcgcacaggagccagcgtggccctcacgtccatcagcaatgtcacagccttcttcatggccgcgttaatcccaattcccgctctgcgggcgttctccctccaggcagcggtagtagtggtgttcaattttgccatggttctgctcatttttcctgcaattctcagcatggatttatatcgacgcgaggacaggagactggatattttctgctgttttacaagcccctgcgtcagcagagtgattcaggttgaacctcaggcctacaccgacacacacgacaatacccgctacagccccccacctccctacagcagccacagctttgcccatgaaacgcagattaccatgcagtccactgtccagctccgcacggagtacgacccccacacgcacgtgtactacaccaccgctgagccgcgctccgagatctctgtgcagcccgtcaccgtgacacaggacaccctcagctgccagagcccagagagcaccagctccacaagggacctgctctcccagttctccgactccagcctccactgcctcgagcccccctgtacgaagtggacactctcatcttttgctgagaagcactatgctcctttcctcttgaaaccaaaagccaaggtagtggtgatcttcctttttctgggcttgctgggggtcagcctttatggcaccacccgagtgagagacgggctggaccttacggacattgtacctcgggaaaccagagaatatgactttattgctgcacaattcaaatacttttctttctacaacatgtatatagtcacccagaaagcagactacccgaatatccagcacttactttacgacctacacaggagtttcagtaacgtgaagtatgtcatgttggaagaaaacaaacagcttcccaaaatgtggctgcactacttcagagactggcttcagggacttcaggatgcatttgacagtgactgggaaaccgggaaaatcatgccaaacaattacaagaatggatcagacgatggagtccttgcctacaaactcctggtgcaaaccggcagccgcgataagcccatcgacatcagccagttgactaaacagcgtctggtggatgcagatggcatcattaatcccagcgctttctacatctacctgacggcttgggtcagcaacgaccccgtcgcgtatgctgcctcccaggccaacatccggccacaccgaccagaatgggtccacgacaaagccgactacatgcctgaaacaaggctgagaatcccggcagcagagcccatcgagtatgcccagttccctttctacctcaacggcttgcgggacacctcagactttgtggaggcaattgaaaaagtaaggaccatctgcagcaactatacgagcctggggctgtccagttaccccaacggctaccccttcctcttctgggagcagtacatcggcctccgccactggctgctgctgttcatcagcgtggtgttggcctgcacattcctcgtgtgcgctgtcttccttctgaacccctggacggccgggatcattgtgatggtcctggcgctgatgacggtcgagctgttcggcatgatgggcctcatcggaatcaagctcagtgccgtgcccgtggtcatcctgatcgcttctgttggcataggagtggagttcaccgttcacgttgctttggcctttctgacggccatcggcgacaagaaccgcagggctgtgcttgccctggagcacatgtttgcacccgtcctggatggcgccgtgtccactctgctgggagtgctgatgctggcgggatctgagttcgacttcattgtcaggtatttctttgctgtgctggcgatcctcaccatcctcggcgttctcaatgggctggttttgcttcccgtgcttttgtctttctttggaccatatcctgaggtgtctccagccaacggcttgaaccgcctgcccacaccctcccctgagccaccccccagcgtggtccgcttcgccatgccgcccggccacacgcacagcgggtctgattcctccgactcggagtatagttcccagacgacagtgtcaggcctcagcgaggagcttcggcactacgaggcccagcagggcgcgggaggccctgcccaccaagtgatcgtggaagccacagaaaaccccgtcttcgcccactccactgtggtccatcccgaatccaggcatcacccaccctcgaacccgagacagcagccccacctggactcagggtccctgcctcccggacggcaaggccagcagccccgcagggacccccccagagaaggcttgtggccacccccctacagaccgcgcagagacgcttttgaaatttctactgaagggcattctggccctagcaatagggcccgctggggccctcgcggggcccgttctcacaaccctcggaacccagcgtccactgccatgggcagctccgtgcccggctactgccagcccatcaccactgtgacggcttctgcctccgtgactgtcgccgtgcacccgccgcctgtccctgggcctgggcggaacccccgagggggactctgcccaggctaccctgagactgaccacggcctgtttgaggacccccacgtgcctttccacgtccggtgtgagaggagggattcgaaggtggaagtcattgagctgcaggacgtggaatgcgaggagaggccccggggaagcagctccaactgagggtgattaaaatctgaagcaaagaggccaaagattggaaaccccccacccccacctctttccagaactgcttgaagagaactggttggagttatggaaaagatgccctgtgccaggacagcagttcattgttactgtaaccgattgtattattttgttaaatatttctataaatatttaagagatgtacacatgtgtaatataggaaggaaggatgtaaagtggtatgatctggggcttctccactcctgccccagagtgtggaggccacagtggggcctctccgtatttgtgcattgggctccgtgccacaaccaagcttcattagtcttaaatttcagcatatgttgctgctgcttaaatattgtataatttacttgtataattctatgcaaatattgcttatgtaataggattattttgtaaaggtttctgtttaaaatattttaaatttgcatatcacaaccctgtggtagtatgaaatgttactgttaactttcaaacacgctatgcgtgataatttttttgtttaatgagcagatatgaagaaagcacgttaatcctggtggcttctctaggtgtcgttgtgtgcggtcctcttgtttggctgtgcgtgtgaacacgtgtgtgagttcaccatgtactgtactgtgattttttttttgtcttgttttgtttctctacactgtctgtaacctgtagtaggctctgacctagtcaggctggaagcgtcaggatatcttttcttcgtgctggtgagggctggccctaaacatccacctaatcctttcaaatcagcccggcaaaagctagactctcctcgtgtctacggcatctcttatgatcattggctgccatccaggaccccaatttgtgcttcagggggataatctccttctctcggatcattgtgatggatgctggaacctcagggtatggagctcacatcagttcatcatggtgggtgttagagaattcggtgacatgcctagtgctgagccttggctgggccatgagagtctgtatactctaaaaagcatgcagcatggtgcccctcttctgaccaacacacacacgacccctcccccaacacccccaaattcaagagtggatgtggccctgtcacaggtagaaaaacctatttagttaattctttcttggcccacagtctcccagaaatgatgttttgagtccctatagtttaaactccctctcttaaatggagcagctggttgaggctttctagatctgtttgcatcttctttaaaactaagtggtgagcatgcattgtggtgtagaggcaggcattatgtaggataagagctccggggggattcttcatgcaccagtgtttagggtacgtgcttcctaagtaaatccaaacattgtctccatcctccccgtcattagtgctctttcaatgtgatgtgggaaagcaggaggatggacacaccccactgaaagatgtaggcaggggcaggtctctcaaccaggcatatttttaaaagttgcttctgtactggttctcttcttttgctctgaggtgtgggctccctcatctcgtaaccagagaccagcacatgtcagggaagcacccagtgtcggctccccatccaaatccacaccagcaccttgttacagacaagaagtcagaggaaagggcggggtccctgcagggctgaagcctaagctactgtgaggcgctcacgagtggcagctcctgttactcccttttaaattacctgggaaatcttaacagaaaggtaatgggcccccagaaatacccacagcatagtgacctcagaccctgatactcaccacaaaacttttaagatgctgattgggagccgcttgtggctgctgggtgtgtgtgtgtgtgtgtgcgtgcgtgcgtgtgtgtgtgtctctgctggggaccctggccacccccctgctgctgtcttggtgcctgtcacccacatggtctgccatcctaacacccagctctgctcagaaaacgtcctgcgtggaggagggatgatgcagaattctgaagtcgacttccctctggctcctggcgtgccctcgctcccttcctgagcccagctcgtgttgcgccggaggctgcgcggcccctgatttctgcatggtgtagaactttctccaatagtcacattggcaaagggagaactggggtgggcggggggtggggctggcagggaattagaatttctctctctcttttaatagttttattttgtctgtcctgtttgttcatttggatgttttaatttttaaaaaaaaaaaaactttgctgatatttataattttgtatcataagaatgttttcctctacagtatttgtcatgccagtttataacaaaaaaaaatgcagggattttatttctattggaaacattacagctatgttttacttttggacagaatttttatttgtatagagtgcttactaatgttaaatagttcagagtatataacatttacattaaggactcatggtaggttttagggtaaggagtttaaaggaaataaatattcaaactgggtctcattgccaattttggtggaaatgagtttgtgtcatttcaattacaaagataaaagtatgccatataatttatttatatgaagatttatttttgtagtgtacatagtagtcatcaagtcttttgacagaagtatatttttaaagaatttatatgtgatgaatccataatgtctggaactttgctgagacatgagtgggcacagttttcattgtaaattacagcaaggaaagaaaatgtttaacagtgttaagagagtcagagcagagtggatattcatgcgattatgaagtgtttattagttaccattggcgacctagcatgcttctcatttcaaaccttggaaggtgaaaatgtacaaactctctaaataattaatgttcaaacactgatagaaattctaacatgaataaaaaataatataacttgttggttatatctttgtttgtagaatgctttttttctttaaaatacttgggagagacagttagtgttggagccatcagaaactgttgtttcatcttgctgaccttgtgacactcttcttttttgctctatctgatggagagagttttaggttttcctcctttttgttttgtataaatagtgggtataagcatagctctgttacatggatgtattacaaagtgggggctgagcttttagtgtgatcatcacccaaatagtgtacattgtacccattaattaatttcttatcacctgaccctatttttgttttctcataccaagaaacttcctaagttaaccatcaaaattagtccttctgtcatctctcttagcatacttatttcccttatgtgatgcctaataatgagggaacataaataaagccaaattcaaagataaaaaaaaaaaaaa

SEQ ID NO: 474 - DNA, 7831 bp, Homo sapiens
aattcagctcacacagcctctccccacgctatggaaatgcgtcgggagtgaactccggcggccgcgctcaccacgtggatccccacttactaccattctcggcgggggtccagttgggggaacccgcaatatgttgttccaaagagcgctcgcccctagcgcccgtccccgagggtgatggacagagcaggactggtttgctggctcctgaaccttgggctccatcgctgggattacgcagcccctcccttctcagctctggggggaaggctactggccggaaagcgccgctgtggctgagagcgaagtttcagagactcttatttaaactgggttgttacattcaaaaaaactgcggcaagttcttggttgtgggcctcctcatatttggggccttcgcggtgggattaaaagcagcgaacctcgagaccaacgtggaggagctgtgggtggaagttggaggacgagtaagtcgtgaattaaattatactcgccagaagattggagaagaggctatgtttaatcctcaactcatgatacagacccctaaagaagaaggtgctaatgtcctgaccacagaagcgctcctacaacacctggactcggcactccaggccagccgtgtccatgtatacatgtacaacaggcagtggaaattggaacatttgtgttacaaatcaggagagcttatcacagaaacaggttacatggatcagataatagaatatctttacccttgtttgattattacacctttggactgcttctgggaaggggcgaaattacagtctgggacagcatacctcctaggtaaacctcctttgcggtggacaaacttcgaccctttggaattcctggaagagttaaagaaaataaactatcaagtggacagctgggaggaaatgctgaataaggctgaggttggtcatggttacatggaccgcccctgcctcaatccggccgatccagactgccccgccacagcccccaacaaaaattcaaccaaacctcttgatatggcccttgttttgaatggtggatgtcatggcttatccagaaagtatatgcactggcaggaggagttgattgtgggtggcacagtcaagaacagcactggaaaactcgtcagcgcccatgccctgcagaccatgttccagttaatgactcccaagcaaatgtacgagcacttcaaggggtacgagtatgtctcacacatcaactggaacgaggacaaagcggcagccatcctggaggcctggcagaggacatatgtggaggtggttcatcagagtgtcgcacagaactccactcaaaaggtgctttccttcaccaccacgaccctggacgacatcctgaaatccttctctgacgtcagtgtcatccgcgtggccagcggctacttactcatgctcgcctatgcctgtctaaccatgctgcgctgggactgctccaagtcccagggtgccgtggggctggctggcgtcctgctggttgcactgtcagtggctgcaggactgggcctgtgctcattgatcggaatttcctttaacgctgcaacaactcaggttttgccatttctcgctcttggtgttggtgtggatgatgtttttcttctggcccacgccttcagtgaaacaggacagaataaaagaatcccttttgaggacaggaccggggagtgcctgaagcgcacaggagccagcgtggccctcacgtccatcagcaatgtcacagccttcttcatggccgcgttaatcccaattcccgctctgcgggcgttctccctccaggcagcggtagtagtggtgttcaattttgccatggttctgctcatttttcctgcaattctcagcatggatttatatcgacgcgaggacaggagactggatattttctgctgttttacaagcccctgcgtcagcagagtgattcaggttgaacctcaggcctacaccgacacacacgacaatacccgctacagccccccacctccctacagcagccacagctttgcccatgaaacgcagattaccatgcagtccactgtccagctccgcacggagtacgacccccacacgcacgtgtactacaccaccgctgagccgcgctccgagatctctgtgcagcccgtcaccgtgacacaggacaccctcagctgccagagcccagagagcaccagctccacaagggacctgctctcccagttctccgactccagcctccactgcctcgagcccccctgtacgaagtggacactctcatcttttgctgagaagcactatgctcctttcctcttgaaaccaaaagccaaggtagtggtgatcttcctttttctgggcttgctgggggtcagcctttatggcaccacccgagtgagagacgggctggaccttacggacattgtacctcgggaaaccagagaatatgactttattgctgcacaattcaaatacttttctttctacaacatgtatatagtcacccagaaagcagactacccgaatatccagcacttactttacgacctacacaggagtttcagtaacgtgaagtatgtcatgttggaagaaaacaaacagcttcccaaaatgtggctgcactacttcagagactggcttcagggacttcaggatgcatttgacagtgactgggaaaccgggaaaatcatgccaaacaattacaagaatggatcagacgatggagtccttgcctacaaactcctggtgcaaaccggcagccgcgataagcccatcgacatcagccagttgactaaacagcgtctggtggatgcagatggcatcattaatcccagcgctttctacatctacctgacggcttgggtcagcaacgaccccgtcgcgtatgctgcctcccaggccaacatccggccacaccgaccagaatgggtccacgacaaagccgactacatgcctgaaacaaggctgagaatcccggcagcagagcccatcgagtatgcccagttccctttctacctcaacggcttgcgggacacctcagactttgtggaggcaattgaaaaagtaaggaccatctgcagcaactatacgagcctggggctgtccagttaccccaacggctaccccttcctcttctgggagcagtacatcggcctccgccactggctgctgctgttcatcagcgtggtgttggcctgcacattcctcgtgtgcgctgtcttccttctgaacccctggacggccgggatcattgtgatggtcctggcgctgatgacggtcgagctgttcggcatgatgggcctcatcggaatcaagctcagtgccgtgcccgtggtcatcctgatcgcttctgttggcataggagtggagttcaccgttcacgttgctttggcctttctgacggccatcggcgacaagaaccgcagggctgtgcttgccctggagcacatgtttgcacccgtcctggatggcgccgtgtccactctgctgggagtgctgatgctggcgggatctgagttcgacttcattgtcaggtatttctttgctgtgctggcgatcctcaccatcctcggcgttctcaatgggctggttttgcttcccgtgcttttgtctttctttggaccatatcctgaggtgtctccagccaacggcttgaaccgcctgcccacaccctcccctgagccaccccccagcgtggtccgcttcgccatgccgcccggccacacgcacagcgggtctgattcctccgactcggagtatagttcccagacgacagtgtcaggcctcagcgaggagcttcggcactacgaggcccagcagggcgcgggaggccctgcccaccaagtgatcgtggaagccacagaaaaccccgtcttcgcccactccactgtggtccatcccgaatccaggcatcacccaccctcgaacccgagacagcagccccacctggactcagggtccctgcctcccggacggcaaggccagcagccccgcagggacccccccagagaaggcttgtggccacccccctacagaccgcgcagagacgcttttgaaatttctactgaagggcattctggccctagcaatagggcccgctggggccctcgcggggcccgttctcacaaccctcggaacccagcgtccactgccatgggcagctccgtgcccggctactgccagcccatcaccactgtgacggcttctgcctccgtgactgtcgccgtgcacccgccgcctgtccctgggcctgggcggaacccccgagggggactctgcccaggctaccctgagactgaccacggcctgtttgaggacccccacgtgcctttccacgtccggtgtgagaggagggattcgaaggtggaagtcattgagctgcaggacgtggaatgcgaggagaggccccggggaagcagctccaactgagggtgattaaaatctgaagcaaagaggccaaagattggaaaccccccacccccacctctttccagaactgcttgaagagaactggttggagttatggaaaagatgccctgtgccaggacagcagttcattgttactgtaaccgattgtattattttgttaaatatttctataaatatttaagagatgtacacatgtgtaatataggaaggaaggatgtaaagtggtatgatctggggcttctccactcctgccccagagtgtggaggccacagtggggcctctccgtatttgtgcattgggctccgtgccacaaccaagcttcattagtcttaaatttcagcatatgttgctgctgcttaaatattgtataatttacttgtataattctatgcaaatattgcttatgtaataggattattttgtaaaggtttctgtttaaaatattttaaatttgcatatcacaaccctgtggtagtatgaaatgttactgttaactttcaaacacgctatgcgtgataatttttttgtttaatgagcagatatgaagaaagcacgttaatcctggtggcttctctaggtgtcgttgtgtgcggtcctcttgtttggctgtgcgtgtgaacacgtgtgtgagttcaccatgtactgtactgtgattttttttttgtcttgttttgtttctctacactgtctgtaacctgtagtaggctctgacctagtcaggctggaagcgtcaggatatcttttcttcgtgctggtgagggctggccctaaacatccacctaatcctttcaaatcagcccggcaaaagctagactctcctcgtgtctacggcatctcttatgatcattggctgccatccaggaccccaatttgtgcttcagggggataatctccttctctcggatcattgtgatggatgctggaacctcagggtatggagctcacatcagttcatcatggtgggtgttagagaattcggtgacatgcctagtgctgagccttggctgggccatgagagtctgtatactctaaaaagcatgcagcatggtgcccctcttctgaccaacacacacacgacccctcccccaacacccccaaattcaagagtggatgtggccctgtcacaggtagaaaaacctatttagttaattctttcttggcccacagtctcccagaaatgatgttttgagtccctatagtttaaactccctctcttaaatggagcagctggttgaggctttctagatctgtttgcatcttctttaaaactaagtggtgagcatgcattgtggtgtagaggcaggcattatgtaggataagagctccggggggattcttcatgcaccagtgtttagggtacgtgcttcctaagtaaatccaaacattgtctccatcctccccgtcattagtgctctttcaatgtgatgtgggaaagcaggaggatggacacaccccactgaaagatgtaggcaggggcaggtctctcaaccaggcatatttttaaaagttgcttctgtactggttctcttcttttgctctgaggtgtgggctccctcatctcgtaaccagagaccagcacatgtcagggaagcacccagtgtcggctccccatccaaatccacaccagcaccttgttacagacaagaagtcagaggaaagggcggggtccctgcagggctgaagcctaagctactgtgaggcgctcacgagtggcagctcctgttactcccttttaaattacctgggaaatcttaacagaaaggtaatgggcccccagaaatacccacagcatagtgacctcagaccctgatactcaccacaaaacttttaagatgctgattgggagccgcttgtggctgctgggtgtgtgtgtgtgtgtgtgcgtgcgtgcgtgtgtgtgtgtctctgctggggaccctggccacccccctgctgctgtcttggtgcctgtcacccacatggtctgccatcctaacacccagctctgctcagaaaacgtcctgcgtggaggagggatgatgcagaattctgaagtcgacttccctctggctcctggcgtgccctcgctcccttcctgagcccagctcgtgttgcgccggaggctgcgcggcccctgatttctgcatggtgtagaactttctccaatagtcacattggcaaagggagaactggggtgggcggggggtggggctggcagggaattagaatttctctctctcttttaatagttttattttgtctgtcctgtttgttcatttggatgttttaatttttaaaaaaaaaaaaactttgctgatatttataattttgtatcataagaatgttttcctctacagtatttgtcatgccagtttataacaaaaaaaaatgcagggattttatttctattggaaacattacagctatgttttacttttggacagaatttttatttgtatagagtgcttactaatgttaaatagttcagagtatataacatttacattaaggactcatggtaggttttagggtaaggagtttaaaggaaataaatattcaaactgggtctcattgccaattttggtggaaatgagtttgtgtcatttcaattacaaagataaaagtatgccatataatttatttatatgaagatttatttttgtagtgtacatagtagtcatcaagtcttttgacagaagtatatttttaaagaatttatatgtgatgaatccataatgtctggaactttgctgagacatgagtgggcacagttttcattgtaaattacagcaaggaaagaaaatgtttaacagtgttaagagagtcagagcagagtggatattcatgcgattatgaagtgtttattagttaccattggcgacctagcatgcttctcatttcaaaccttggaaggtgaaaatgtacaaactctctaaataattaatgttcaaacactgatagaaattctaacatgaataaaaaataatataacttgttggttatatctttgtttgtagaatgctttttttctttaaaatacttgggagagacagttagtgttggagccatcagaaactgttgtttcatcttgctgaccttgtgacactcttcttttttgctctatctgatggagagagttttaggttttcctcctttttgttttgtataaatagtgggtataagcatagctctgttacatggatgtattacaaagtgggggctgagcttttagtgtgatcatcacccaaatagtgtacattgtacccattaattaatttcttatcacctgaccctatttttgttttctcataccaagaaacttcctaagttaaccatcaaaattagtccttctgtcatctctcttagcatacttatttcccttatgtgatgcctaataatgagggaacataaataaagccaaattcaaagataaaaaaaaaaaaaa

SEQ ID NO: 475 - DNA, 5572 bp, Homo sapiens
cctcccctcgcccggcgcggtcccgtccgcctctcgctcgcctcccgcctcccctcggtcttccgaggcgcccgggctcccggcgcggcggcggagggggcgggcaggccggcgggcggtgatgtggcgggactctttatgcgctgcggcaggatacgcgctcggcgctgggacgcgactgcgctcagttctctcctctcggaagctgcagccatgatggaagtttgagagttgagccgctgtgaggcgaggccgggctcaggcgagggagatgagagacggcggcggccgcggcccggagcccctctcagcgcctgtgagcagccgcgggggcagcgccctcggggagccggccggcctgcggcggcggcagcggcggcgtttctcgcctcctcttcgtcttttctaaccgtgcagcctcttcctcggcttctcctgaaagggaaggtggaagccgtgggctcgggcgggagccggctgaggcgcggcggcggcggcggcacctcccgctcctggagcgggggggagaagcggcggcggcggcggccgcggcggctgcagctccagggagggggtctgagtcgcctgtcaccatttccagggctgggaacgccggagagttggtctctccccttctactgcctccaacacggcggcggcggcggcggcacatccagggacccgggccggttttaaacctcccgtccgccgccgccgcaccccccgtggcccgggctccggaggccgccggcggaggcagccgttcggaggattattcgtcttctccccattccgctgccgccgctgccaggcctctggctgctgaggagaagcaggcccagtcgctgcaaccatccagcagccgccgcagcagccattacccggctgcggtccagagccaagcggcggcagagcgaggggcatcagctaccgccaagtccagagccatttccatcctgcagaagaagccccgccaccagcagcttctgccatctctctcctcctttttcttcagccacaggctcccagacatgacagccatcatcaaagagatcgttagcagaaacaaaaggagatatcaagaggatggattcgacttagacttgacctatatttatccaaacattattgctatgggatttcctgcagaaagacttgaaggcgtatacaggaacaatattgatgatgtagtaaggtttttggattcaaagcataaaaaccattacaagatatacaatctttgtgctgaaagacattatgacaccgccaaatttaattgcagagttgcacaatatccttttgaagaccataacccaccacagctagaacttatcaaacccttttgtgaagatcttgaccaatggctaagtgaagatgacaatcatgttgcagcaattcactgtaaagctggaaagggacgaactggtgtaatgatatgtgcatatttattacatcggggcaaatttttaaaggcacaagaggccctagatttctatggggaagtaaggaccagagacaaaaagggagtaactattcccagtcagaggcgctatgtgtattattatagctacctgttaaagaatcatctggattatagaccagtggcactgttgtttcacaagatgatgtttgaaactattccaatgttcagtggcggaacttgcaatcctcagtttgtggtctgccagctaaaggtgaagatatattcctccaattcaggacccacacgacgggaagacaagttcatgtactttgagttccctcagccgttacctgtgtgtggtgatatcaaagtagagttcttccacaaacagaacaagatgctaaaaaaggacaaaatgtttcacttttgggtaaatacattcttcataccaggaccagaggaaacctcagaaaaagtagaaaatggaagtctatgtgatcaagaaatcgatagcatttgcagtatagagcgtgcagataatgacaaggaatatctagtacttactttaacaaaaaatgatcttgacaaagcaaataaagacaaagccaaccgatacttttctccaaattttaaggtgaagctgtacttcacaaaaacagtagaggagccgtcaaatccagaggctagcagttcaacttctgtaacaccagatgttagtgacaatgaacctgatcattatagatattctgacaccactgactctgatccagagaatgaaccttttgatgaagatcagcatacacaaattacaaaagtctgaatttttttttatcaagagggataaaacaccatgaaaataaacttgaataaactgaaaatggacctttttttttttaatggcaataggacattgtgtcagattaccagttataggaacaattctcttttcctgaccaatcttgttttaccctatacatccacagggttttgacacttgttgtccagttgaaaaaaggttgtgtagctgtgtcatgtatatacctttttgtgtcaaaaggacatttaaaattcaattaggattaataaagatggcactttcccgttttattccagttttataaaaagtggagacagactgatgtgtatacgtaggaattttttccttttgtgttctgtcaccaactgaagtggctaaagagctttgtgatatactggttcacatcctacccctttgcacttgtggcaacagataagtttgcagttggctaagagaggtttccgaagggttttgctacattctaatgcatgtattcgggttaggggaatggagggaatgctcagaaaggaaataattttatgctggactctggaccatataccatctccagctatttacacacacctttctttagcatgctacagttattaatctggacattcgaggaattggccgctgtcactgcttgttgtttgcgcatttttttttaaagcatattggtgctagaaaaggcagctaaaggaagtgaatctgtattggggtacaggaatgaaccttctgcaacatcttaagatccacaaatgaagggatataaaaataatgtcataggtaagaaacacagcaacaatgacttaaccatataaatgtggaggctatcaacaaagaatgggcttgaaacattataaaaattgacaatgatttattaaatatgttttctcaattgtaacgacttctccatctcctgtgtaatcaaggccagtgctaaaattcagatgctgttagtacctacatcagtcaacaacttacacttattttactagttttcaatcataatacctgctgtggatgcttcatgtgctgcctgcaagcttcttttttctcattaaatataaaatattttgtaatgctgcacagaaattttcaatttgagattctacagtaagcgttttttttctttgaagatttatgatgcacttattcaatagctgtcagccgttccacccttttgaccttacacattctattacaatgaattttgcagttttgcacattttttaaatgtcattaactgttagggaattttacttgaatactgaatacatataatgtttatattaaaaaggacatttgtgttaaaaaggaaattagagttgcagtaaactttcaatgctgcacacaaaaaaaagacatttgatttttcagtagaaattgtcctacatgtgctttattgatttgctattgaaagaatagggtttttttttttttttttttttttttttttaaatgtgcagtgttgaatcatttcttcatagtgctcccccgagttgggactagggcttcaatttcacttcttaaaaaaaatcatcatatatttgatatgcccagactgcatacgattttaagcggagtacaactactattgtaaagctaatgtgaagatattattaaaaaggtttttttttccagaaatttggtgtcttcaaattataccttcaccttgacatttgaatatccagccattttgtttcttaatggtataaaattccattttcaataacttattggtgctgaaattgttcactagctgtggtctgacctagttaatttacaaatacagattgaataggacctactagagcagcatttatagagtttgatggcaaatagattaggcagaacttcatctaaaatattcttagtaaataatgttgacacgttttccataccttgtcagtttcattcaacaatttttaaatttttaacaaagctcttaggatttacacatttatatttaaacattgatatatagagtattgattgattgctcataagttaaattggtaaagttagagacaactattctaacacctcaccattgaaatttatatgccaccttgtctttcataaaagctgaaaattgttacctaaaatgaaaatcaacttcatgttttgaagatagttataaatattgttctttgttacaatttcgggcaccgcatattaaaacgtaactttattgttccaatatgtaacatggagggccaggtcataaataatgacattataatgggcttttgcactgttattatttttcctttggaatgtgaaggtctgaatgagggttttgattttgaatgtttcaatgtttttgagaagccttgcttacattttatggtgtagtcattggaaatggaaaaatggcattatatatattatatatataaatatatattatacatactctccttactttatttcagttaccatccccatagaatttgacaagaattgctatgactgaaaggttttcgagtcctaattaaaactttatttatggcagtattcataattagcctgaaatgcattctgtaggtaatctctgagtttctggaatattttcttagactttttggatgtgcagcagcttacatgtctgaagttacttgaaggcatcacttttaagaaagcttacagttgggccctgtaccatcccaagtcctttgtagctcctcttgaacatgtttgccatacttttaaaagggtagttgaataaatagcatcaccattctttgctgtggcacaggttataaacttaagtggagtttaccggcagcatcaaatgtttcagctttaaaaaataaaagtagggtacaagtttaatgtttagttctagaaattttgtgcaatatgttcataacgatggctgtggttgccacaaagtgcctcgtttacctttaaatactgttaatgtgtcatgcatgcagatggaaggggtggaactgtgcactaaagtgggggctttaactgtagtatttggcagagttgccttctacctgccagttcaaaagttcaacctgttttcatatagaatatatatactaaaaaatttcagtctgttaaacagccttactctgattcagcctcttcagatactcttgtgctgtgcagcagtggctctgtgtgtaaatgctatgcactgaggatacacaaaaataccaatatgatgtgtacaggataatgcctcatcccaatcagatgtccatttgttattgtgtttgttaacaaccctttatctcttagtgttataaactccacttaaaactgattaaagtctcattcttgtcaaaaaaaaaaaaaaaaaaaaaaaaaaa

SEQ ID NO: 476 - DNA, 1500 bp, Homo sapiens
acgtgcacggtccggccggggcgcgcggagcctggccccgggcgatccatcctgccgggttttcacggcggccaagggggggcggggctaggtggtctctgagaaccgagcttgactccgacgccgcgaaccgacctggagcccgaggggaaagatgctcgactctcttgggggcaccggagcgggcgcaggagaggcctgcggggtgcgtcccactcacagggatcctctttcagttcatttagataggtgccctttgggcccttgaaattcaacggctatgtgttcacgttcagcacgctcggctgagagctttcatttttagggcaaacgagccgagttaccggggaagcgagaggtggggcgctgcaagggagccggatgaggtgatacacgctggcgacacaatagcaggttgctctttgtgctaagactgacaccatgaggacacagatttgggggaagggggaatctctaggcaaaggctgttacagtcaaatctctgcgaacgattgtgatccgacagcggtgcaaaaggaaagagcgaatgcagtccacgccgcggaaatctaggggtagaggcaaggggggagggtattccccttgcagggaccgtccctgcatttccctctacactgagcagcgtggtcacctggtccttttcacctgtgcacaggtaacctcagactcgagtcagtgacactgctcaacgcacccatctcagctttcatcatcagtcctccacccccgccccacaacagcctaccctgcctccggctgggtttctgggcagaggccgaggcttagctcgttatcctcgcctcgcgttgctgcaaaagccgcagcaagtgcagctgcaggctggcggctgggaaccggcccgagcaagccccaggcagctacactgggcatgctcagtagagcctgcggcttggggactctgcgctcgcacccagagctaccgctctgccccctcctaccgccccctgccctgccctgccctcccctcgcccggcgcggtcccgtccgcctctcgctcgcctcccgcctcccctcggtcttccgaggcgcccgggctcccggcgcggcggcggagggggcgggcaggccggcgggcggtgatgtggcgggactctttatgcgctgcggcaggatacgcgctcggcgctgggacgcgactgcgctcagttctctcctctcggaagctgcagccatgatggaagtttgagagttgagccgctgtgaggcgaggccgggctcaggcgagggagatgagagacggcggcggccgcggcccggagcccctctcagcgcctgtgagcagccgcgggggcagcgccctcggggagccggccggcctgcggcggcggcagcggcggcgtttctcgcctcctcttcgtcttttctaaccgtgcagcctcttcctcggcttctcctgaaagggaaggtggaagccgtgggctcgggcgggagccggctgaggcgcggcggcggcggcgg

SEQ ID NO: 477 - DNA, 2111 bp, Homo sapiens
ctctgcgaacgattgtgatccgacagcggtgcaaaaggaaagagcgaatgcagtccacgccgcggaaatctaggggtagaggcaaggggggagggtattccccttgcagggaccgtccctgcatttccctctacactgagcagcgtggtcacctggtccttttcacctgtgcacaggtaacctcagactcgagtcagtgacactgctcaacgcacccatctcagctttcatcatcagtcctccacccccgccccacaacagcctaccctgcctccggctgggtttctgggcagaggccgaggcttagctcgttatcctcgcctcgcgttgctgcaaaagccgcagcaagtgcagctgcaggctggcggctgggaaccggcccgagcaagccccaggcagctacactgggcatgctcagtagagcctgcggcttggggactctgcgctcgcacccagagctaccgctctgccccctcctaccgccccctgccctgccctgccctcccctcgcccggcgcggtcccgtccgcctctcgctcgcctcccgcctcccctcggtcttccgaggcgcccgggctcccggcgcggcggcggagggggcgggcaggccggcgggcggtgatgtggcgggactctttatgcgctgcggcaggatacgcgctcggcgctgggacgcgactgcgctcagttctctcctctcggaagctgcagccatgatggaagtttgagagttgagccgctgtgaggcgaggccgggctcaggcgagggagatgagagacggcggcggccgcggcccggagcccctctcagcgcctgtgagcagccgcgggggcagcgccctcggggagccggccggcctgcggcggcggcagcggcggcgtttctcgcctcctcttcgtcttttctaaccgtgcagcctcttcctcggcttctcctgaaagggaaggtggaagccgtgggctcgggcgggagccggctgaggcgcggcggcggcggcggcacctcccgctcctggagcgggggggagaagcggcggcggcggcggccgcggcggctgcagctccagggagggggtctgagtcgcctgtcaccatttccagggctgggaacgccggagagttggtctctccccttctactgcctccaacacggcggcggcggcggctggcacatccagggacccgggccggttttaaacctcccgtgcgccgccgccgcaccccccgtggcccgggctccggaggccgccggcggaggcagccgttcggaggattattcgtcttctccccattccgctgccgccgctgccaggcctctggctgctgaggagaagcaggcccagtcgctgcaaccatccagcagccgccgcagcagccattacccggctgcggtccagagccaagcggcggcagagcgaggggcatcagctaccgccaagtccagagccatttccatcctgcagaagaagccccgccaccagcagcttctgccatctctctcctcctttttcttcagccacaggctcccagacatgacagccatcatcaaagagatcgttagcagaaacaaaaggagatatcaagaggatggattcgacttagacttgacctgtatccatttctgcggctgctcctctttacctttctgtcactctcttagaacgtgggagtagacggatgcgaaaatgtccgtagtttgggtgactataacatttaaccctggtcaggttgctaggtcatatattttgtgtttcctttctgtgtattcaacctagggtgtgtttggctagacggaactcttgcctggttgcaagtgtcaagccaccgattgctttcttaggctatctatatggtctcttcctgagggctattgtccgttaatacagaatacagtacactgttagtggattagcgagctcggtaatccggtctcctaaatgaacaaaaaagtagacgctttttgaggttgagcatatttcgattaaatcttggcttaggccctagatcaagggtttagatcagaataaaatgaaaattagtgttgcacgtacgcatattgcatcagaatcttgcagtgattgttttagtttcctgagttgcattgatagatt

SEQ ID NO: 478 - DNA, 1085 bp, Homo sapiens
gtctaattatcatgtagaataggaaattgcggtctagaaaggttaagtgacttgtccaaattacacaactagttagagacatagccagctcttaaatctgacttccagattttcactgtgtcttcttttttctgtaacgtgttgccttttttagccatgaaaaattagaagttgaactcttgtcttttcaggcaggtgtcaattttggggttttgttttgatttttggtttttgacataaagtactttagttctgtgatgtataaaccgtgagtttctgtttttctcatatacctgaatactgtccatgtggaagttaccttttatctttaccagtattaacacataaatggttatacataaatacattgaccaccttttattactccagctatagtggggaaaactttcttttcataactagctaatgttttaaaaagtattcttttagtttgattgctgcatatttcagatatttctttccttaactaaagtactcagatatttatccaaacattattgctatgggatttcctgcagaaagacttgaaggcgtatacaggaacaatattgatgatgtagtaaggtaagaatgctttgattttctatttcaaatattgatgtttatattcatgttgtgttttcatttagaaaagatttctaagccacagaaaaagatactttgtgatgtaaactattattgtagtgctctataatcattttttggcttaccgtacctaatggacttcagggggatacagttcatttgataagaactgaccttatacattacataatcaggtacttatgtgatatcatttcctggactccataaaatgctggtcaccaggtttaatacctggattccattacagtgtgatttttgtcttatttcatagttggggattaggcttaaaatcctagagtggatttattcagttaaatttattcacactaagatgtagatgactaatactgtatatttttatgtagaccaaattttaaggtaccactgtgcatatgtataccaactacctgaagaagtatttggttggtacaagagatatagaaaggaatcgctgggtg

SEQ ID NO: 479 - DNA, 1045 bp, Homo sapiens
tgtttaatacctttgtacagaattaatagttagtacgtggatctttcaaatatcaaaagttttcagtttgatgggaaaatgatgtctgaattttcagggttatttttaagagtacttgattatgactgtcttgtaaatctctatgagctaggtatacttgcactaaatgctaatgctttttaaagaagttatgtcttaatattcagtctcattatgttaggttgaagatagaagattatgaaaatattctctgaaaagctctggttttacttcagattgtataaatctgtgtaatgtaataattatttaagaatgacatgattactactctaaacccatagaaggggtatttgttggattatttattttcacttaaatggtatttgagattaggaaaaagaaaatctgtcttttggtttttcttgatagtattaatgtaatttcaaatgttagctcatttttgttaatggtggctttttgtttgtttgttttgttttaaggtttttggattcaaagcataaaaaccattacaagatatacaatctgtaagtatgttttcttatttgtatgcttgcaaatatcttctaaaacaactattaagtgaaagttatctgcttgttagagtgaggtagagttaaagatacattttaacagaattgtattcctaaaccgattaagtcaagaagtccaagagcattgttagatcatttagaaagtgtagtgatgaggtaaaacattgttggcacagattcatgttacttgatctgctttaaatgacttggcatctagcccatatttgagcccataaccgtgtggtaatttgaagtgtaattcacagtagagcttctgttaaagcactaatagcatcttccatggaggtatacttcagagtgaatataattttgtttatcctgtgtctctagagctattgactgaaaaagctgttagggcattctctaactgtacatcacctaagttatttaaaattgctgaattaggtggcttgtcttgtctaggacagagttttaaggactgcccacctgat

SEQ ID NO: 480 - DNA, 1044 bp, Homo sapiens
aacaacattcagtttttctttactgtccttatgcttttactatttttaacatatatctttttgaagaatagtttgagaattatgtatgcttaactatgagatacagatactattgaaactagtcagttgtttataggtacttgtaaaattaaaaatatattccaatagcatgcagatttttcatagaggaaatttgaaagcatggaagcacctgaatttacagtactctgtattagtggcatcacaagtttttaagcaaatgtattagctctaattgcatacacttaatcttttaagctttggttttattattataatatgggggtgataacagtatctacttaatagaattcttgttattacatgaaataattaatgttaaacacagcataatatgtgtcacattataaagattcaggcaatgtttgttagtattagtacttttttttcttcctaagtgcaaaagataactttatatcacttttaaacttttcttttagttgtgctgaaagacattatgacaccgccaaatttaattgcagaggtaggtatgaatgtactgtactatgttgtataacttaaacccgatagactgtatcttactgtcataacaataatgagtcatccagattatcgagtgagatacatatttaagaattatctttaaaaatttcaaaaattttaattttactgttgtgttttaggaaaaagtattgcataaagctattaatattgtcaggaagactaaagtgcagcatagactaagaattaggaaaattcctagactaaaaatagtataaggagagggtttacctactatttgaggcagttggtctaatagtaagcaatcacagggagaaagcagaactacttaactcttctgtgttgaggaatgacataaaaggtaggaaaggatataacaaatgttgataagaggagtctgatggatgagaggagggaactgctttaaatgagtttctacttcagacataagttaattctcagagcccacaaaaactttcacttttatttgtgaaatacaac

SEQ ID NO: 481 - DNA, 1239 bp, Homo sapiens
cctttaaataacacacttagcatttttattttatgaaatgtaatatgtagttctttgcatagtttatcctattagtaatctattctgtctttggaatatgttttgtgatgatgaaataaatactataaatagtattattccttttgcattgagagtcctgacgaaatgtccatgtgacagttcattttgggtttagctctacctctaatatgtgacctatgctaccagtccgtatagcgtaaattcccagaatatatcctcctgaataaaatgggggaaaataatacctggcttccttaatgattatatttaagacttatcaagagactattttctatttaacaattagaaagttaagcaatacattatttttctctggaatccagtgtttcttttaaatacctgttaagtttgtatgcaacatttctaaagttacctacttgttaattaaaaattcaagagtttttttttcttattctgaggttatctttttaccacagttgcacaatatccttttgaagaccataacccaccacagctagaacttatcaaacccttttgtgaagatcttgaccaatggctaagtgaagatgacaatcatgttgcagcaattcactgtaaagctggaaagggacgaactggtgtaatgatatgtgcatatttattacatcggggcaaatttttaaaggcacaagaggccctagatttctatggggaagtaaggaccagagacaaaaaggtaagttattttttgatgtttttcctttcctcttcctggatctgagaatttattggaaaacagattttgggtttctttttttccttcagttttattgaggtgtaattgacaagtaaaaattatatataaatacaatgtataatatgatgttttgatgtatgtgtatatacattgtgaaatgattactacagtcaaactacttaacatattcatcacctcacataattattattctccccccagggtgaaagcatttaagatctacaagctacaattttcaattatacaatgttattattaactatagtcactatgctgtccagtagagcttcagatcttgttcatcttgtgttcctccctccccaccctcagtccctggaaaacaggttttaaagatagttgctaatccttatttcttctaaatttttaaatcagttgctgcctcaatttctatatgagaaatgactgattgatttcatttttctgttcacgctaccatt

SEQ ID NO: 482 - DNA, 1142 bp, Homo sapiens
ccagcatcactttttgctactgctgtttctgccttaaaggcaatatgcctctgtctagtttgctgattctgatactctttcccctggaaagtaggtaatcaagtttgtgaggagctgtgtgtttaaggagtccataaatccttgtggggagccctaggtgtatagagcatagctgtagggcagaggcctttgacacttattctggatatgcagtggcctttgcctatggggttcatgggtcagagcgctgttgtgacctttgaataaatgggttgttatgataattgttttaagggaggagagttattctgatatcctttgtattgatattgctcttatttattattgagctggatttaagtattaatcatttaaggtcaaatttctaatgtatatatgttcttaaatggctacgacccagttaccatagcaatttagtgaaataactataatggaacattttttttcaatttggcttctcttttttttctgtccaccagggagtaactattcccagtcagaggcgctatgtgtattattatagctacctgttaaagaatcatctggattatagaccagtggcactgttgtttcacaagatgatgtttgaaactattccaatgttcagtggcggaacttgcagtaagtgcttgaaattctcatccttccatgtattggaacagttttcttaaccatatctagaagtttacataaaaatttagaaagaaatttaccacatttgaaatttatgcaggagactatatttctgaagcatttgaacaaattaattagctttgttgttcaactcattgggctaaagaagccaaaagcaatgggttttaatgtagtcgaagccaaattatatttatgaaagaaatattctgtgttataaccaccaaatacagcccaattctgactagatgatggaagaacctgtcccatcagaggtccagcatgaggtccagcagaggtccaccagaggagttcagcaatttgctgctcttagggcagggatcaattccttaatatcttaggaagactaggtattgacagtaatggtgacaaagcaatgaaaaggaaaggaagaagtgataagacgtggcagcaagctgaagtatgatgagtaaagaataggaatcaaa

SEQ ID NO: 483 - DNA, 1167 bp, Homo sapiens
ccgcatgctagagacttaagaatactatagcaaatatctgtcttctttacatttaaaaatttttcgtgactactccctgttgatatctgtcttaaaagttacttttgatgtagttcacaaatgtaccagataattatttcatcgtttttaatgcttaaagtttttatttgtattaggatttttagtatgattttaatgttaaagttttgaagttactctgccactagaagtctaattttgggacttactattcatgaaataggaattgacttttatataagtaataggaccttattttgaaggttcaaactggagaaaatcttacattgtttatatttttatttcatttatttcagttgatttgcttgagatcaagattgcagatacagaatccatatttcgtgtatattgctgatattaatcattaaaatcgtttttgacagtttgacagttaaaggcatttcctgtgaaataatactggtatgtatttaaccatgcagatcctcagtttgtggtctgccagctaaaggtgaagatatattcctccaattcaggacccacacgacgggaagacaagttcatgtactttgagttccctcagccgttacctgtgtgtggtgatatcaaagtagagttcttccacaaacagaacaagatgctaaaaaaggtttgtactttactttcattgggagaaatatccaaaataaggacagattaaaagctatattttattttatgacatgtaaggaactataatttgttttctattagatctgcaggtgttttgcttactctggcattggtgagacattataagggtaaataatcctgtttgaaggaaaaggccttatggcattgtaacatgagaggaatttttcttaacaaggatggttaactgagaagaaattagcatgggaccaatattttaaaaattttggtctataggtagaaatgagatctgttctgtggtcttatgtagtgacacaaaccactttttctccattttggcttatgtttctttttctttccttttttttttttttcctttttgttagagacagggtcttgttctattgcccaggctgagtagctaagactacaagcatgtgccaccacacccagctaattttttttatttttatttttgtagggacagggtctcactat

SEQ ID NO: 484 - DNA, 1225 bp, Homo sapiens
aagtaaacatgtatttgccatgcgtcatcagggaagttgcactcaccgtccaagaacttttgttaaagtaaatcttggaataggtagctcatttgaaatgtagaaaaaattaaatccatatctgaattttgtttatatgtatgtacacgtaaactaaaaacgtatttaaagctagtattagatgagaaaagaggtttttttacttaaaattttaaggcaaaagtagtttatcttagatcttgtgagattgtatttttggtttaaaatttgagaatttgagtgaagaaaaatcatgtgaatgaaaatgcaacagataactcagattgccttataatagtctttgtgtttacctttattcagaatatcaaatgatagtttattttgttgactttttgcaaatgtttaacataggtgacagattttcttttttaaaaaaataaaacatcattaattaaatatgtcatttcatttctttttcttttctttttttttttttttaggacaaaatgtttcacttttgggtaaatacattcttcataccaggaccagaggaaacctcagaaaaagtagaaaatggaagtctatgtgatcaagaaatcgatagcatttgcagtatagagcgtgcagataatgacaaggaatatctagtacttactttaacaaaaaatgatcttgacaaagcaaataaagacaaagccaaccgatacttttctccaaattttaaggtcagttaaattaaacattttgtgggggttgttgacttgtatgtatgtgatgtgtgtttaattctaggagtacagctgatgaagaacttgcttgacaagtttttaacttatgtattatttcgaagcagtgtttacgtagcagtaacatgaaagtttctaataaaatacccaatgtacacagcgtcaaaaaagctgcatttttccttttcctaattcttcgttgtttgctgaaatctggggcaaaggtgcgggagggggctaaatgactgggatatgaagtaggaatgggagaggaaagaaatagatgggaactcagtcatttgggaatgattcatatggaatgtttttactgcttccactcctgtctgccttccaatttattctcaatccctcagagtgatcttaaaaatagacttgattgtgtcacttctgtttacactttataaggaccttgtgtttttttttttaccatgacctacaaggcccagcataatttagca

SEQ ID NO: 485 - DNA, 4489 bp, Homo sapiens
ctttgggaggctgaggcaggcagattgcctgagctcaggagtttgagatcagcctgggcaacatcatgaaccccatttctactaaaatacaaaaaattatctgggcatggtggtgtacacctgtagccctagctgtttgggaggctaaggcacgagaattgcttgaacccgggaggcagaggttgcagtgagccaagatcatgccactgcactccagcttggcaacagagcaagactcttgtctccagaaataaaaataaataaattgtattaacatcctgatagtttatctgtttagtacctagcaagaaagaaaatgttgaacatcttaagaagagggtcatttaaaaggcctcttaaagatcatgtttgttacagtgcttaaaaattaatatgttcatctgcaaaatggaataaaaaatctgttaaaaatatatttcactaaatagtttaagatgagtcatatttgtgggttttcattttaaattttctttctctaggtgaagctgtacttcacaaaaacagtagaggagccgtcaaatccagaggctagcagttcaacttctgtaacaccagatgttagtgacaatgaacctgatcattatagatattctgacaccactgactctgatccagagaatgaaccttttgatgaagatcagcatacacaaattacaaaagtctgaatttttttttatcaagagggataaaacaccatgaaaataaacttgaataaactgaaaatggacctttttttttttaatggcaataggacattgtgtcagattaccagttataggaacaattctcttttcctgaccaatcttgttttaccctatacatccacagggttttgacacttgttgtccagttgaaaaaaggttgtgtagctgtgtcatgtatatacctttttgtgtcaaaaggacatttaaaattcaattaggattaataaagatggcactttcccgttttattccagttttataaaaagtggagacagactgatgtgtatacgtaggaattttttccttttgtgttctgtcaccaactgaagtggctaaagagctttgtgatatactggttcacatcctacccctttgcacttgtggcaacagataagtttgcagttggctaagagaggtttccgaagggttttgctacattctaatgcatgtattcgggttaggggaatggagggaatgctcagaaaggaaataattttatgctggactctggaccatataccatctccagctatttacacacacctttctttagcatgctacagttattaatctggacattcgaggaattggccgctgtcactgcttgttgtttgcgcatttttttttaaagcatattggtgctagaaaaggcagctaaaggaagtgaatctgtattggggtacaggaatgaaccttctgcaacatcttaagatccacaaatgaagggatataaaaataatgtcataggtaagaaacacagcaacaatgacttaaccatataaatgtggaggctatcaacaaagaatgggcttgaaacattataaaaattgacaatgatttattaaatatgttttctcaattgtaacgacttctccatctcctgtgtaatcaaggccagtgctaaaattcagatgctgttagtacctacatcagtcaacaacttacacttattttactagttttcaatcataatacctgctgtggatgcttcatgtgctgcctgcaagcttcttttttctcattaaatataaaatattttgtaatgctgcacagaaattttcaatttgagattctacagtaagcgttttttttctttgaagatttatgatgcacttattcaatagctgtcagccgttccacccttttgaccttacacattctattacaatgaattttgcagttttgcacattttttaaatgtcattaactgttagggaattttacttgaatactgaatacatataatgtttatattaaaaaggacatttgtgttaaaaaggaaattagagttgcagtaaactttcaatgctgcacacaaaaaaaagacatttgatttttcagtagaaattgtcctacatgtgctttattgatttgctattgaaagaatagggtttttttttttttttttttttttttttttaaatgtgcagtgttgaatcatttcttcatagtgctcccccgagttgggactagggcttcaatttcacttcttaaaaaaaatcatcatatatttgatatgcccagactgcatacgattttaagcggagtacaactactattgtaaagctaatgtgaagatattattaaaaaggtttttttttccagaaatttggtgtcttcaaattataccttcaccttgacatttgaatatccagccattttgtttcttaatggtataaaattccattttcaataacttattggtgctgaaattgttcactagctgtggtctgacctagttaatttacaaatacagattgaataggacctactagagcagcatttatagagtttgatggcaaatagattaggcagaacttcatctaaaatattcttagtaaataatgttgacacgttttccataccttgtcagtttcattcaacaatttttaaatttttaacaaagctcttaggatttacacatttatatttaaacattgatatatagagtattgattgattgctcataagttaaattggtaaagttagagacaactattctaacacctcaccattgaaatttatatgccaccttgtctttcataaaagctgaaaattgttacctaaaatgaaaatcaacttcatgttttgaagatagttataaatattgttctttgttacaatttcgggcaccgcatattaaaacgtaactttattgttccaatatgtaacatggagggccaggtcataaataatgacattataatgggcttttgcactgttattatttttcctttggaatgtgaaggtctgaatgagggttttgattttgaatgtttcaatgtttttgagaagccttgcttacattttatggtgtagtcattggaaatggaaaaatggcattatatatattatatatataaatatatattatacatactctccttactttatttcagttaccatccccatagaatttgacaagaattgctatgactgaaaggttttcgagtcctaattaaaactttatttatggcagtattcataattagcctgaaatgcattctgtaggtaatctctgagtttctggaatattttcttagactttttggatgtgcagcagcttacatgtctgaagttacttgaaggcatcacttttaagaaagcttacagttgggccctgtaccatcccaagtcctttgtagctcctcttgaacatgtttgccatacttttaaaagggtagttgaataaatagcatcaccattctttgctgtggcacaggttataaacttaagtggagtttaccggcagcatcaaatgtttcagctttaaaaaataaaagtagggtacaagtttaatgtttagttctagaaattttgtgcaatatgttcataacgatggctgtggttgccacaaagtgcctcgtttacctttaaatactgttaatgtgtcatgcatgcagatggaaggggtggaactgtgcactaaagtgggggctttaactgtagtatttggcagagttgccttctacctgccagttcaaaagttcaacctgttttcatatagaatatatatactaaaaaatttcagtctgttaaacagccttactctgattcagcctcttcagatactcttgtgctgtgcagcagtggctctgtgtgtaaatgctatgcactgaggatacacaaaaataccaatatgatgtgtacaggataatgcctcatcccaatcagatgtccatttgttattgtgtttgttaacaaccctttatctcttagtgttataaactccacttaaaactgattaaagtctcattcttgtcattgtgtgggtgttttattaaatgagagtttataattcaaattgcttaagtccattgaagttttaattaatgggcagccaaatgtgaatacaaagttttcagtttttttttttcctgctgtccttcaaagcctactgtttaaaaaaaaaaaaaaaaaaaaacatggcctgagagtagagtatctgtctactcatgtttaattaaggaaaaacacttatttttagggctttagtcatcacttcataaattgtataagcacattaaatagcgttctagtcctgaaaaagtccaagattcttagaaaattgtgcatatttttattatgacagatgtttgaagataattccccagaatggatttgatactttagatttcaattttgtggcttttgtctattattctgtactctgccatcagcatatggaaagcttcatttactcatcatgacttgtgccatataaaaattgatatttcggaatagtctaaaggactttttgtact

SEQ ID NO: 486 - DNA, 1500 bp, Homo sapiens
cagctttaaaaaataaaagtagggtacaagtttaatgtttagttctagaaattttgtgcaatatgttcataacgatggctgtggttgccacaaagtgcctcgtttacctttaaatactgttaatgtgtcatgcatgcagatggaaggggtggaactgtgcactaaagtgggggctttaactgtagtatttggcagagttgccttctacctgccagttcaaaagttcaacctgttttcatatagaatatatatactaaaaaatttcagtctgttaaacagccttactctgattcagcctcttcagatactcttgtgctgtgcagcagtggctctgtgtgtaaatgctatgcactgaggatacacaaaaataccaatatgatgtgtacaggataatgcctcatcccaatcagatgtccatttgttattgtgtttgttaacaaccctttatctcttagtgttataaactccacttaaaactgattaaagtctcattcttgtcattgtgtgggtgttttattaaatgagagtttataattcaaattgcttaagtccattgaagttttaattaatgggcagccaaatgtgaatacaaagttttcagtttttttttttcctgctgtccttcaaagcctactgtttaaaaaaaaaaaaaaaaaaaaacatggcctgagagtagagtatctgtctactcatgtttaattaaggaaaaacacttatttttagggctttagtcatcacttcataaattgtataagcacattaaatagcgttctagtcctgaaaaagtccaagattcttagaaaattgtgcatatttttattatgacagatgtttgaagataattccccagaatggatttgatactttagatttcaattttgtggcttttgtctattattctgtactctgccatcagcatatggaaagcttcatttactcatcatgacttgtgccatataaaaattgatatttcggaatagtctaaaggactttttgtacttgaatttaatcatgttgtttctaatattcttaaaagcttgaagactaaagcatatcctttcaacaaagcatagtaaggtaataagaaagtgtagtttgtacaagtgttaaaaaaataaagtagacaatgttacagtgggacttattatttcaagtttacattttctccatgtaattttttaaaaagtaaatgaaaaaatgtgcaataatgtaaaatatgaagtgtatgtgtacacacattttatttttcggtatcttgggtatacgtatggttgaaaactatactggagtctaaaagtattctaatttataagaagacattttggtgatgtttgaaaaatagaaatgtgctagttttgtttttatatcatgtcctttgtacgttgtaatatgagctggcttggttcagtaaatgccatcaccatttccattgagaatttaaaactcaccagtgtttaatatgcaggcttccaaaggcttatgaaaaaaatcaagaccctt

SEQ ID NO: 487 - DNA, 6597 bp, Homo sapiens
tttcccggcgtgccccaggagagcggcgtggacgcgtgcgggcctagaggcccacgtgatccgcagggcggccgaggcaggaagctgtgagtgcgcggttgcggggtcgcattgtggctacggctttgcgtccccggcgggcagccccaggctggtccccgcctccgctctccccaccggcggggaaagcagctggtgtgggaggaaaggctccatcccccgccccctctctcccgctgttggctggcaggatcttttggcagtcctgtggcctcgctccccgcccggatcctcctgaccctgagattcgcgggtctcacgtcccgtgcacgccttgcttcggcctcagttaagcctttgtggactccaggtccctggtgagattagaaacgtttgcaaacatgtcccggatcgaaaagatgagcattctgggcgtgcggagttttggaatagaggacaaagataagcaaattatcactttcttcagcccccttacaattttggttggacccaatggggcgggaaagacgaccatcattgaatgtctaaaatatatttgtactggagatttccctcctggaaccaaaggaaatacatttgtacacgatcccaaggttgctcaagaaacagatgtgagagcccagattcgtctgcaatttcgtgatgtcaatggagaacttatagctgtgcaaagatctatggtgtgtactcagaaaagcaaaaagacagaatttaaaactctggaaggagtcattactagaacaaagcatggtgaaaaggtcagtctgagctctaagtgtgcagaaattgaccgagaaatgatcagttctcttggggtttccaaggctgtgctaaataatgtcattttctgtcatcaagaagattctaattggcctttaagtgaaggaaaggctttgaagcaaaagtttgatgagattttttcagcaacaagatacattaaagccttagaaacacttcggcaggtacgtcagacacaaggtcagaaagtaaaagaatatcaaatggaactaaaatatctgaagcaatataaggaaaaagcttgtgagattcgtgatcagattacaagtaaggaagcccagttaacatcttcaaaggaaattgtcaaatcctatgagaatgaacttgatccattgaagaatcgtctaaaagaaattgaacataatctctctaaaataatgaaacttgacaatgaaattaaagccttggatagccgaaagaagcaaatggagaaagataatagtgaactggaagagaaaatggaaaaggtttttcaagggactgatgagcaactaaatgacttatatcacaatcaccagagaacagtaagggagaaagaaaggaaattggtagactgtcatcgtgaactggaaaaactaaataaagaatctaggcttctcaatcaggaaaaatcagaactgcttgttgaacagggtcgtctacagctgcaagcagatcgccatcaagaacatatccgagctagagattcattaattcagtctttggcaacacagctagaattggatggctttgagcgtggaccattcagtgaaagacagattaaaaattttcacaaacttgtgagagagagacaagaaggggaagcaaaaactgccaaccaactgatgaatgactttgcagaaaaagagactctgaaacaaaaacagatagatgagataagagataagaaaactggactgggaagaataattgagttaaaatcagaaatcctaagtaagaagcagaatgagctgaaaaatgtgaagtatgaattacagcagttggaaggatcttcagacaggattcttgaactggaccaggagctcataaaagctgaacgtgagttaagcaaggctgagaaaaacagcaatgtagaaaccttaaaaatggaagtaataagtctccaaaatgaaaaagcagacttagacaggaccctgcgtaaacttgaccaggagatggagcagttaaaccatcatacaacaacacgtacccaaatggagatgctgaccaaagacaaagctgacaaagatgaacaaatcagaaaaataaaatctaggcacagtgatgaattaacctcactgttgggatattttcccaacaaaaaacagcttgaagactggctacatagtaaatcaaaagaaattaatcagaccagggacagacttgccaaattgaacaaggaactagcttcatctgagcagaataaaaatcatataaataatgaactaaaaagaaaggaagagcagttgtccagttacgaagacaagctgtttgatgtttgtggtagccaggattttgaaagtgatttagacaggcttaaagaggaaattgaaaaatcatcaaaacagcgagccatgctggctggagccacagcagtttactcccagttcattactcagctaacagacgaaaaccagtcatgttgccccgtttgtcagagagtttttcagacagaggctgagttacaagaagtcatcagtgatttgcagtctaaactgcgacttgctccagataaactcaagtcaacagaatcagagctaaaaaaaaaggaaaagcggcgtgatgaaatgctgggacttgtgcccatgaggcaaagcataattgatttgaaggagaaggaaataccagaattaagaaacaaactgcagaatgtcaatagagacatacagcgcctaaagaacgacatagaagaacaagaaacactcttgggtacaataatgcctgaagaagaaagtgccaaagtatgcctgacagatgttacaattatggagaggttccagatggaacttaaagatgttgaaagaaaaattgcacaacaagcagctaagctacaaggaatagacttagatcgaactgtccaacaagtcaaccaggagaaacaagagaaacagcacaagttagacacagtttctagtaagattgaattgaatcgtaagcttatacaggaccagcaggaacagattcaacatctaaaaagtacaacaaatgagctaaaatctgagaaacttcagatatccactaatttgcaacgtcgtcagcaactggaggagcagactgtggaattatccactgaagttcagtctttgtacagagagataaaggatgctaaagagcaggtaagccctttggaaacaacattggaaaagttccagcaagaaaaagaagaattaatcaacaaaaaaaatacaagcaacaaaatagcacaggataaactgaatgatattaaagagaaggttaaaaatattcatggctatatgaaagacattgagaattatattcaagatgggaaagacgactataagaagcaaaaagaaactgaacttaataaagtaatagctcaactaagtgaatgcgagaaacacaaagaaaagataaatgaagatatgagactcatgagacaagatattgatacacagaagatacaagaaaggtggctacaagataaccttactttaagaaaaagaaatgaggaactaaaagaagttgaagaagaaagaaaacaacatttgaaggaaatgggtcaaatgcaggttttgcaaatgaaaagtgaacatcagaagttggaagagaacatagacaatataaaaagaaatcataatttggcattagggcgacagaaaggttatgaagaagaaattattcattttaagaaagaacttcgagaaccacaatttcgggatgctgaggaaaagtatagagaaatgatgattgttatgaggacaacagaacttgtgaacaaggatctggatatttattataagactcttgaccaagcaataatgaaatttcacagtatgaaaatggaagaaatcaataaaattatacgtgacctgtggcgaagtacctatcgtggacaagatattgaatacatagaaatacggtctgatgccgatgaaaatgtatcagcttctgataaaaggcggaattataactaccgagtggtgatgctgaagggagacacagccttggatatgcgaggacgatgcagtgctggacaaaaggtattagcctcactcatcattcgcctggccctggctgaaacgttctgcctcaactgtggcatcattgccttggatgagccaacaacaaatcttgaccgagaaaacattgaatctcttgcacatgctctggttgagataataaaaagtcgctcacagcagcgtaacttccagcttctggtaatcactcatgatgaagattttgtggagcttttaggacgttctgaatatgtggagaaattctacaggattaaaaagaacatcgatcagtgctcagagattgtgaaatgcagtgttagctccctgggattcaatgttcattaaaaatatccaagatttaaatgccatagaaatgtaggtcctcagaaagtgtataataagaaacttatttctcatatcaacttagtcaataagaaaatatattctttcaaaggaacattgtgtctaggattttggatgttgagaggttctaaaatcatgaaacttgtttcactgaaaattggacagattgcctgtttctgatttgctgctcttcatcccattccaggcagcctctgtcaggccttcagggttcagcagtacagccgagactcgactctgtgcctccctccccagtgcaaatgcatgcttcttctcaaagcactgttgagaaggagataattactgccttgaaaatttatggttttggtatttttttaaatcatagttaaatgttacctctgaatttacttccttgcatgtggtttgaaaaactgagtattaatatctgaggatgaccagaaatggtgagatgtatgtttggctctgcttttaactttataaatccagtgacctctctctctgggacttggtttccccaactaaaatttgaagtagttgaatggggtctcaaagtttgacaggaaccttaagtaatcatctaagtcagtacccaccaccttcttctcctacatatcccttccagatggtcatccagactcagagctctctctacagagaggaaattctccactgtgcacacccacctttggaaagctctgaccacttgaggcctgatctgcccatcgtgaagaagcctgtaacactcctctgcgtctatcctgtgtagcatactggcttcaccatcaatcctgattcctctctaagtgggcattgccatgtggaaggcaagccaggctcactcacagagtcaaggcctgctccctgtagggtccaaccagacctggaagaacaggcctctccatttgctcttcagatgccacttctaagaaaagcctaatcacagtttttcctggaattgccagctgacatcttgaatccttccattccacacagaatgcaaccaagtcacacgcttttgaattatgctttgtagagttttgtcattcagagtcagccaggaccataccgggtcttgattcagtcacatggcatggttttgtgccatctgtagctataatgagcatgtttgcctagacagcttttctcaactgggtccagaagagaattaagccctaaggtcctaaggcatctatctgtgctaggttaaatggttggcccccaaagatagacaggtcctgatttctagaacccgtgactgttactttatacagcaaaggaaactttgcagatgtgattaaagctaaggaccttaagacagagtatcctgggggtggtggtggggtgggggggggtcctaaatgtaatcacgagtaagattaagagcaaatcaattctagtcatatattaaacatccacaataaccaagatatttttatcccaagaatgcaagatttcagaaaatgaaaaatctgttgataaatccatcactataataaaaccgaaggtgaaaaaaattctgaaaaaattctagcagctatatttgataaaattcaacatctcctagctttagcaaactcacagttttgcaaataatattttcttaatgttatctgttgctaaatcaaaattaaacagtcatcttaactgcaaaataaaacatttctcagtaaatattaaagccagttaccttctatcaacatgttaatgaaagtgctagttgttgcagcaaagaataacaaaggcaatacacgatcaatataggcagtgaaacaaaagtatcatttgcaagttaaaacagacttcccaattttaaatctggtttccccctgaatatgtggcatccttggcagcacttctgagagtggctgctttcattccaagaagcccatgggtttggaggtgggataggtgcctttctggcttctcattgctgcttctagatcagtctccaaatatcccccttccccacattggaatgaatagccatcacagcatggatggaggttagaatgagccagactgcctgggctcaaatcctagcacaccactcactagctggggaccttgagcaagttatttgtcctgttttctgtttccttatatgtaaaagtgggtaaaatggtacatattttgtagggttgttatgaagattgaatgacattatttacaaactgcttagaactgcttgccacctactaaatactgtgtaagtgttcaagaaaaagctgtcttcatttca

SEQ ID NO: 488 - DNA, 1500 bp, Homo sapiens
aattttaatgttttgttccattagttattttaactattttgtaataactgacactttccggttttttttaacctggtacagcaagagactatttctcactggtcttccccacttgcatcctttggcacatacatttatgtattaggttctgtaaattatttgcttgggattgtatgactggagaaacatttcctacatttttccaaggcaggcagaggcaaattataccactacagtaattccaaatttgtgtttcatttaaatgtcctccactattgtttcagtaatttttatgtatgtttctctaggcccttaaatgtgatatccctccattaagtttgtttccaagaaagcaatattctcagttacttctgagacaggtaacttctctttcccttatttttaaagatatctattgctgggagcactgatcggaatggattacctctacattcttcatatttgcagactgcttttagttttagttcccagacttttggtcttaaagacgcctttacactaaaaaattacgggggacctcaaagagcgtgtacgtgagttataattatcaacatttactcaattagaaattaaaattggtatttctaagcgcaagaatacacatgcgcacattccattaaccgccactgcaatggcgtcatcacatgttatgtgatcactggaaattactacacgaacgttagagagagaatgagaatgaaaaggaaaatagttttgacacgaactgaccccgcttcctgggtctccaatccaccccaccactacccccattccaggagtcccaggatcaagctttgggaagcgccatccgtcacaggtcttggtctccccttccaaaagtcagtgcctctccaggctgcccatccccagcaaagatccggaagtccgctgcccctggcaacagcacccagcacctagccctctgcttcgccgtaccgcacccggaagtcggagctgcgcacgcaccgcgggactctgatttcccggcgtgccccaggagagcggcgtggacgcgtgcgggcctagaggcccacgtgatccgcagggcggccgaggcaggaagctgtgagtgcgcggttgcggggtcgcattgtggctacggctttgcgtccccggcgggcagccccaggctggtccccgcctccgctctccccaccggcggggaaagcagctggtgtgggaggaaaggctccatcccccgccccctctctcccgctgttggctggcaggatcttttggcagtcctgtggcctcgctccccgcccggatcctcctgaccctgagattcgcgggtctcacgtcccgtgcacgccttgcttcggcctcagttaagcctttgtgggctccaggtccctggtgagattagaaacgtttgcaaacatgtcccggatcgaaaagatgagcattctgggcgtgcggagttttggaatagaggacaaagataagcaaattatcactttcttcagcccccttacaatt

SEQ ID NO: 489 - DNA, 1530 bp, Homo sapiens
tcttaaagacgcctttacactaaaaaattacgggggacctcaaagagcgtgtacgtgagttataattatcaacatttactcaattagaaattaaaattggtatttctaagcgcaagaatacacatgcgcacattccattaaccgccactgcaatggcgtcatcacatgttatgtgatcactggaaattactacacgaacgttagagagagaatgagaatgaaaaggaaaatagttttgacacgaactgaccccgcttcctgggtctccaatccaccccaccactacccccattccaggagtcccaggatcaagctttgggaagcgccatccgtcacaggtcttggtctccccttccaaaagtcagtgcctctccaggctgcccatccccagcaaagatccggaagtccgctgcccctggcaacagcacccagcacctagccctctgcttcgccgtaccgcacccggaagtcggagctgcgcacgcaccgcgggactctgatttcccggcgtgccccaggagagcggcgtggacgcgtgcgggcctagaggcccacgtgatccgcagggcggccgaggcaggaagctgtgagtgcgcggttgcggggtcgcattgtggctacggctttgcgtccccggcgggcagccccaggctggtccccgcctccgctctccccaccggcggggaaagcagctggtgtgggaggaaaggctccatcccccgccccctctctcccgctgttggctggcaggatcttttggcagtcctgtggcctcgctccccgcccggatcctcctgaccctgagattcgcgggtctcacgtcccgtgcacgccttgcttcggcctcagttaagcctttgtgggctccaggtccctggtgagattagaaacgtttgcaaacatgtcccggatcgaaaagatgagcattctgggcgtgcggagttttggaatagaggacaaagataagcaaattatcactttcttcagcccccttacaattttggttggacccaatggggcgggaaagacggtaagtcttcagtagccgccttcagtttacaggtcgctacatctttcggagaataaaatgggaagttgagaactctccttaggagcagaagcgtccctagggctccacaggtgtaggcccttaaagtgccttagggtgtggcctgcaggctacagcgaccttaggagtttgcctgaagcagtctcggaaggatgtccggacctggcctggggacaaggtttacttaagaatcccacgataccgggagctgtcgccgctcactcagagttcagttcccactggatgccctttggtctgtattgatgtttttaacgctgtctccttgctttcaaagcatagcattcacttcccagtagttgtcccatacaagaattcctttaaaagttataaaatgatacatacatgactaaagagtttccaagtatgccaactgtccagacataatacatggaaaataaataaattcaaaatgtaactgatgtagtggggcttaacttgga

SEQ ID NO: 490 - DNA, 1084 bp, Homo sapiens
agccgtttgggaggctgaggctgggggattgcttgagcccaggaggtcgagaggtcgaggctgcagtaagccatgatcatgcagctgcactgcagcctgggcagcagaatgagaccctgtctcttaaacaaaaagttcctacagcctggagttaatgtgagaattaaataaatgtatgtaagagtgcttagtacaatacagtacttaactgttagccattcttattattaacttaaattagtttaaagggtttcagttgaaaataattatttttttcccaagtaacaattcttcatattaggataacttcttagttatatagcatttctgtgaacttacagcattaacacttaatcatatttttattacaggttttataatgtcagattttatcttttatagtttccatgataaataatatttttgtaatgaattcatattttatggtaaacttctgtggttctcttataacgaaataatgtaattttctatttctttagaccatcattgaatgtctaaaatatatttgtactggagatttccctcctggaaccaaaggaaatacatttgtacacgatcccaaggtaatggtgctagtacaattttgtatttttataattataaaaatgataatagcttattatagaaaacttggcactggaaaactataaagagaaatgaaagtcagccccacacagttttagcacccagtagtaaccgttgttgacattttcatgtgttttcctcctcctttaaatactgttttatatagctgatgtcatactcttaattttgtattctgggtttttttccccacttaacattatcatgaagtcctatgtcattaaaaaactatcatctgggtgtttggtatgtaagtgtttcttttaatctttatactgctttgtatgtctgagatattttctacttaaagtgcatgaacactttagtagttatgtaattttcttacattagattgctttcagtttttcattaaaatgtaccatgataagccaggcttgggggtgtgtgccaatactcccagatagctctagaggctgagatgggaggattgcttcagccc

SEQ ID NO: 491 - DNA, 1152 bp, Homo sapiens
agcttgtgcggggaaactccttcttataaaaccatcaggtctcgtgagacttactcactgtcacaagaacagcatgggaaagacctgtccccatgattcaattaccttcaactgggtacctcctgcaacatgtggaaattcaagatgagatttgggtggagacaaagacaaaccaaatcattctacctttctataaacttgcaatttttaaggataaaaaacatttttgatgcttacagagataaaattcatttatttgaaaaatctgcatacctgatctcctaatgatgctgaataaaggaggtagatagtatatcatttttgtaaattaattaaacagtattcttctatattttggatagcatgtaaaaatatcactcattttggatgtttttctttttgttccctcattttgggtaagattgcttatgcctttttctcagaaccaacactggtgcttattaaagtaacataagttttttctgtgttttccttcaaaggttgctcaagaaacagatgtgagagcccagattcgtctgcaatttcgtgatgtcaatggagaacttatagctgtgcaaagatctatggtgtgtactcagaaaagcaaaaagacagaatttaaaactctggaaggagtcattactagaacaaagtaggtgtttatatgatatttgaatttctgttcattttcagtcttttaggtctgtaagttgatggttgttttctactataagtttaggggagcatattaaatttttttcaatagactttagactttatttttttagagcagttttgggtttatagcaaaattgggcagaaagtactgagcttccattttctccctacccccacgcacacacagcctcctccactatgaacatttgattttttgtggatactatttgtcagttaaatagaatgatcccatgaaagacttagggttatgttccattctcttgagtaatttctgaacagttgctgaattgaaagcacataatcactcaaatacaggttgaatgagtaaaaaattctagtgtcatgtttaagaatgggtgagatgagaagcagacaagtaggaaagaatgataaattgttcctttcaaccattatcattctgttagaggcaggtatcattttctaatggatatg

SEQ ID NO: 492 - DNA, 1186 bp, Homo sapiens
ccgtgcctggcccagtgtaatattttcaaaatacaaattgaaatgtataaaaaacagtaaagacagatattgcctctgctcaccagagcagtctgttactgaagaaagaaccccattctaagatgtttttaacttacctttgcctgtctgctattgatcatcatgttttgttttattctttgtctcttatttttaagacagttaatgctctatatagtatctctaagtattctaaattattatatttaaaagtccaaatatgtaaaaaataaattctggcttcctttcctgaactactttgttttacatatcttttcatctgtgaaccgttaaatagtttaagagttacactttttagcatgatgaagccatttctaacgggataggtgaagggcctttttttttattcttttaaagaagtacagtatgaattgattaagcaatagaatagatacactgaaggttattttacatatattcttgattttcattttctgtaggcatggtgaaaaggtcagtctgagctctaagtgtgcagaaattgaccgagaaatgatcagttctcttggggtttccaaggctgtgctaaataatgtcattttctgtcatcaagaagattctaattggcctttaagtgaaggaaaggctttgaagcaaaagtttgatgagattttttcagcaacaaggtttgtaacccttaaatagactttgtagtccattaagttattgaactgtgtttgcaatttggatgcttctttttaacagaaaaaatttaaaaagcagaaaggtcatcagttactacctctcatccagcagcaaccattgggcatattttctttcacttgtctttctgtgcgtatatttatttacctgattgacagtataaatgtaatttttttcacttaccattatgtcataggcattttacaagttattaaaaactcattgtaactgtaatcttagtgacagcataatatcccactgtatgaatatataccataatttactttgccagaaatttgatttttgtttcatatcttcaaagatacattaaagccttagaaacacttcggcaggtacgtcagacacaaggtcagaaagtaaaagaatatcaaatggaactaaaatatctgaagcaatataaggaaaaagcttgtgagattcgtgatcagattacaagtaagga

SEQ ID NO: 493 - DNA, 1205 bp, Homo sapiens
ccgagaaatgatcagttctcttggggtttccaaggctgtgctaaataatgtcattttctgtcatcaagaagattctaattggcctttaagtgaaggaaaggctttgaagcaaaagtttgatgagattttttcagcaacaaggtttgtaacccttaaatagactttgtagtccattaagttattgaactgtgtttgcaatttggatgcttctttttaacagaaaaaatttaaaaagcagaaaggtcatcagttactacctctcatccagcagcaaccattgggcatattttctttcacttgtctttctgtgcgtatatttatttacctgattgacagtataaatgtaatttttttcacttaccattatgtcataggcattttacaagttattaaaaactcattgtaactgtaatcttagtgacagcataatatcccactgtatgaatatataccataatttactttgccagaaatttgatttttgtttcatatcttcaaagatacattaaagccttagaaacacttcggcaggtacgtcagacacaaggtcagaaagtaaaagaatatcaaatggaactaaaatatctgaagcaatataaggaaaaagcttgtgagattcgtgatcagattacaagtaaggaagcccagttaacatcttcaaaggaaattgtcaaatcctatgagaatgaacttgatccattgaaggtaacttgattttatttttaattgacaaaaattgtatatctttatggtatacagcatgatgttttgatataagtatacatcgtggactggctaaatcaagctatttaacgttcattacttcaatttttttatggtgagaacacttaaaatctactctcttagcaattatatattgttattaactaaagtcacagtgatgtacagtagttaatttcttgtatactaaataggtagtcctttttttgctatagtagcattctccccttatttgtatatgaaactgaatggcttgtatatttcttgaattatcagggagctaatgttttaggtctatgttagtctttaaattgctgaaagagcttggatttgaaagaaaacaaatttgtagcatcacactaaattagtagtatagatcactaggtgttaaatagcaatatcattacccaaccttacagttctgtattaatatttttaaaaattgacatctttctagagaattt

SEQ ID NO: 494 - DNA, 1129 bp, Homo sapiens
aggccactgagctcccttgttgtactttacttgctcagagtcctctgtggttgagcaagctttggattaaagtatactcttcatgtaaatttgcctataggctcagaatgcattggtaactcaccatgaatttctagccttctcagtagtcctgacttaaaaaaatacattaaatagttacctttttaaggattaagtaactctaaatgcccaatgaatgaataatgacttttgtggcaggtgttgaggacaggacatggtgtttggagttagaagtggaatttaattcctgcttctctctactagctgtgaggacttgggccaagttacttaatgtctctgaacttcagtttctctaggcctgctctacagtgttattgttagccttaaatgagatcacttttactaaatgcctggacctggagtatcttacttgtcttcatctatcagccatgtaagctatagtgagttttatttatgtaatgtttctttattttcagaatcgtctaaaagaaattgaacataatctctctaaaataatgaaacttgacaatgaaattaaagccttggatagccgaaagaagcaaatggagaaagataatagtgaactggaagagaaaatggaaaaggtttgtggtggtagaattttgttctgcttcaaaattttgggattattgtaatgaactttatttgaatccattttgccatccacattggaaaaaaacaaatacagatcttgttacttctatgtatatgttaaaatgaaggatattgaataaggtttggtttatatttgatacctcaaagtgatcatattttcttatgtttgtacattaaagctttttattttggtgttacacaggtttttcaagggactgatgagcaactaaatgacttatatcacaatcaccagagaacagtaagggagaaagaaaggaaattggtagactgtcatcgtgaactggaaaaactaaataaagaatctaggcttctcaatcaggaaaaatcagaactgcttgttgaacagggtaggacaaaatgtttatttggtcgtttttcctactatgatgttatacattttctgtatgaatgaagaatctccaaggacttatgctgagtgaaaagccaa

SEQ ID NO: 495 - DNA, 1166 bp, Homo sapiens
tgctctacagtgttattgttagccttaaatgagatcacttttactaaatgcctggacctggagtatcttacttgtcttcatctatcagccatgtaagctatagtgagttttatttatgtaatgtttctttattttcagaatcgtctaaaagaaattgaacataatctctctaaaataatgaaacttgacaatgaaattaaagccttggatagccgaaagaagcaaatggagaaagataatagtgaactggaagagaaaatggaaaaggtttgtggtggtagaattttgttctgcttcaaaattttgggattattgtaatgaactttatttgaatccattttgccatccacattggaaaaaaacaaatacagatcttgttacttctatgtatatgttaaaatgaaggatattgaataaggtttggtttatatttgatacctcaaagtgatcatattttcttatgtttgtacattaaagctttttattttggtgttacacaggtttttcaagggactgatgagcaactaaatgacttatatcacaatcaccagagaacagtaagggagaaagaaaggaaattggtagactgtcatcgtgaactggaaaaactaaataaagaatctaggcttctcaatcaggaaaaatcagaactgcttgttgaacagggtaggacaaaatgtttatttggtcgtttttcctactatgatgttatacattttctgtatgaatgaagaatctccaaggacttatgctgagtgaaaagccaatcttaaaaggctatacacagtatgtttccatttatataacatttttataatgtcaaaattttagaaatagtggagaaattagtggttgccagggatactgggtaagagaaaggacaggagggagctaggtatggttatgattagaacaaaaagagagtccttgtagtattggaactgttcagtatcttgactgccatagtggatatatgaaccgacacaggtgataaaattatatagaacttaatatacacacatccacatgctcaggggtacaaataaaattggggaaatttgaataagattgatgaattatatcaatatcagtattctggttgtgatattttactgcagttttgcaaaatgttatcattgggagaaactgggcaaaatgtacaagag

SEQ ID NO: 496 - DNA, 1194 bp, Homo sapiens
ccaatcttaaaaggctatacacagtatgtttccatttatataacatttttataatgtcaaaattttagaaatagtggagaaattagtggttgccagggatactgggtaagagaaaggacaggagggagctaggtatggttatgattagaacaaaaagagagtccttgtagtattggaactgttcagtatcttgactgccatagtggatatatgaaccgacacaggtgataaaattatatagaacttaatatacacacatccacatgctcaggggtacaaataaaattggggaaatttgaataagattgatgaattatatcaatatcagtattctggttgtgatattttactgcagttttgcaaaatgttatcattgggagaaactgggcaaaatgtacaagagacacactgcattattttttataactcgtgaatctgcagctatctcaactttttaagcaccagttgaaaaaaaaattatgagattttttttttaaaaggtcgtctacagctgcaagcagatcgccatcaagaacatatccgagctagagattcattaattcagtctttggcaacacagctagaattggatggctttgagcgtggaccattcagtgaaagacagattaaaaattttcacaaacttgtgagagagagacaagaaggggaagcaaaaactgccaaccaactgatggcaagtattttgaaatacagtatttgttattttgtttgcatcatattctctacttgaattgttttaatttttggttggactccattttggcatatttttctattagtgttaggataaaatctgctacaaggcagaaaaacctttattgaagcaaatgttcttaagtgtataaagataaaaatatgaagaaaatgtaaacctacattttttatttggttttaagtaaaaatttttaaaaactaattgcagagaaaacatttgctcacagttaatgattatctctgggtaatggttttgattgtttttaaaatacagtcttgaaccacatgttttggtcagtgatagaccacatatttgacattggtcccataaaattataatactgtattttactgtatgttttctgtgtttagatatgtttagatacataaatacttatcatcatgttacagttgccaaagtattcagtacagtaatatgctgtataggtttgtagccca

SEQ ID NO: 497 - DNA, 1207 bp, Homo sapiens
gaaaacatttgctcacagttaatgattatctctgggtaatggttttgattgtttttaaaatacagtcttgaaccacatgttttggtcagtgatagaccacatatttgacattggtcccataaaattataatactgtattttactgtatgttttctgtgtttagatatgtttagatacataaatacttatcatcatgttacagttgccaaagtattcagtacagtaatatgctgtataggtttgtagcccataaacaataggctataccatatagtctatgtgtgtattaaactataccatgtaggcttatgtaaatacattctgatgttcacacaatgataaaattgcctaatgatgcatttcttggaatatatccctgctgagcaacacacgactgtacttttttgtattttcttcagtgtacatatattccttttgcaattaaaaaacttaaattgtttagtaaattattaatgctcattctttacatatgcatttagaatgactttgcagaaaaagagactctgaaacaaaaacagatagatgagataagagataagaaaactggactgggaagaataattgagttaaaatcagaaatcctaagtaagaagcagaatgagctgaaaaatgtgaagtatgaattacagcagttggaaggatcttcagacaggattcttgaactggaccaggagctcataaaagctgtaagatattgtttgaataatctaataattttaagatataatacttttagaagtattttgtctatttttgatcctaagattatagcattttaataaaaacatcaactttgtcttattctcatgtaaaatgaattcatctgaatatcttgatcttctgactctttggttctacaacccgatagcctgaaaattagaatcacatagggagctttttaaagatactgtactcagaccttaaagcttcagaccttccaaatcaaaatctctgagaatggggcatagaaatgtacattcaaaacacaacaaaactggctaattcttatgagcaccttgattaagaacacttaccaggccgggtgcggtgtctcacacctgtaatcccagcactttgggaagccaaggcaggcagataacgtgaggtcaggagttcaagacctgtccagccaacatggtgaaaccccgtctctactaaaaatacaaaaattagctgggcgtggtgg

SEQ ID NO: 498 - DNA, 1183 bp, Homo sapiens
atgtaaacatttatttttgctccataactcaccattgtagcatacatttttgtcagtttagcacttcatcagtgttgtcttgttggggtggggagatacttggtcagggaccacatcacactatttttatagtttctacataccaggcaatatagtgaattacatggggacataataaatatttaattgttgactgaggactcactaatctgtgtacttagacacatgtctcctaattttacagtaattctcacatttctttcctgtttgacccttctaggtttatttactaattctctaccattataacatagtaaggtcactttaataagatataccttagagcatatatagtgccttatgtttttttctcttgttggatgcaaacagtaatatttggaacattctgaggagtagttaatttctaatacactttgtcattattttaattcttgcacaaaatatataacacctttgcatttgtatgaattattgactaggaacgtgagttaagcaaggctgagaaaaacagcaatgtagaaaccttaaaaatggaagtaataagtctccaaaatgaaaaagcagacttagacaggaccctgcgtaaacttgaccaggagatggagcagttaaaccatcatacaacaacacgtacccaaatggagatgctgaccaaagacaaagtatgatttttctttttgttctaattatactgtctggtacttaaaatagcctaccttgcactcataagtcatagactataaggtattaagttggtattgactatattttagaggctaagtgagcttagtactctatataatagactttcaagcttaaaagttattgtttaattacaaaaagttaatacagaaatgtatatatatgtatatacacacatgcacattactgttaacttttaacatacacaaattttaaaattttatattgttcgacttggtactccactcttaaggcttagaaagaccatccccacttgaagactttaagaactttaagaaattttatattttattttcatatttttatagttttaagcttagaactttagtcagtctagaatttatttttgttcttgatataatgtggagatatagactttatttttaaaagattttttttttacctataggctgacaaagatgaacaaatcagaaaaata

SEQ ID NO: 499 - DNA, 1158 bp, Homo sapiens
acccaaatggagatgctgaccaaagacaaagtatgatttttctttttgttctaattatactgtctggtacttaaaatagcctaccttgcactcataagtcatagactataaggtattaagttggtattgactatattttagaggctaagtgagcttagtactctatataatagactttcaagcttaaaagttattgtttaattacaaaaagttaatacagaaatgtatatatatgtatatacacacatgcacattactgttaacttttaacatacacaaattttaaaattttatattgttcgacttggtactccactcttaaggcttagaaagaccatccccacttgaagactttaagaactttaagaaattttatattttattttcatatttttatagttttaagcttagaactttagtcagtctagaatttatttttgttcttgatataatgtggagatatagactttatttttaaaagattttttttttacctataggctgacaaagatgaacaaatcagaaaaataaaatctaggcacagtgatgaattaacctcactgttgggatattttcccaacaaaaaacagcttgaagactggctacatagtaaatcaaaagaaattaatcagaccagggacagacttgccaaattgaagtaagttgcaacatttggagatgtaatagaaatctcttatttcatgcttacctgtttaattgttttaaaataatttattgtcatgaaatggtatgttatattgataaactttagttcttacatacaaggagacttcagaaagttcatggaaaaatggaattaaaagataaaaattttaaataaactgtatttctcaacataagctccatcaagttcaagactcttctgagcagtgataccagcaatttagttcagtcctaaagaactgagggtcctgggaatttaaccatgtcagtgtagtcttttttacattgctagcataaaaatgggtgccctttaaagatttttttaagattaagaaactagaagacaggaggagccaaatcaggactgtaaggtggatgcctaatgatttcccatcgaaactcttgcaaatggcccttgtttgatgagaggaatgagcaggaacattgttgtggtggaaaaggactctctggtga

SEQ ID NO: 500 - DNA, 1176 bp, Homo sapiens
gataaattgtactagtaagcaaaatctttgatgaatgagagggaatgactgatctggacgcaagtggatgacagcaacaaggagggggaggatacaaaagaaacagtatttacaggagagtaaggaagtagtatttgtgaaaggactaaagggaattacggggatgttctcttgtcttctttctgtccaatagtcctagcaagcatcttgctgaggcttaacctgggatcaaagaccatgaacccccagaaaccaggcagaattctgtgtacatttttctgggagcaggcccatgagtaggactggcaggtgagtcagtgtcctagggggagagttaaggcagaagtggactagtccctcaacttctgaaaaaaattatttggtcataccaaactcttgtcatgatttgttggcagaatttgtcttgtttttgcctactcaaattttcaaactaatttctcctattttaaaatgaaaatccatatttgctcttattttagcaaggaactagcttcatctgagcagaataaaaatcatataaataatgaactaaaaagaaaggaagagcagttgtccagttacgaagacaagctgtttgatgtttgtggtagccaggattttgaaagtgatttagacaggcttaaagaggaaattgaaaaatcatcaaaacagcgaggtaagttgtctactttatattatcaggatactttgacacctttgaattttcattcacaggtaactgttaaggatggggaatttaaaaacctggttatggagcctaatggcttggatttcagtcctggctctacaacttactcactgtgtgactttaggcaagttactgaaaccttcctgtgtttcattgtctataaaatgaggacacaactaccacctgtggtactgaggtgtgaatgagattgtaattataaagcccttagaacagtgcctggcacatagaaagctctcagtaggcattttgttatacttataatgtgttaccaaaaaatatttatacaaatctgaatgtatcatgctctttggaagcgaatatcggaattttaaatatcagaatttttatttcttttataatatatttataaagcaagaataatcatatatttatagaaaaagatacaaccgtattcagaatactgtattttatgtttttttctcatt

SEQ ID NO: 501 - DNA, 1238 bp, Homo sapiens
tactttgacacctttgaattttcattcacaggtaactgttaaggatggggaatttaaaaacctggttatggagcctaatggcttggatttcagtcctggctctacaacttactcactgtgtgactttaggcaagttactgaaaccttcctgtgtttcattgtctataaaatgaggacacaactaccacctgtggtactgaggtgtgaatgagattgtaattataaagcccttagaacagtgcctggcacatagaaagctctcagtaggcattttgttatacttataatgtgttaccaaaaaatatttatacaaatctgaatgtatcatgctctttggaagcgaatatcggaattttaaatatcagaatttttatttcttttataatatatttataaagcaagaataatcatatatttatagaaaaagatacaaccgtattcagaatactgtattttatgtttttttctcattggtgatataatttattttcttaaaatagccatgctggctggagccacagcagtttactcccagttcattactcagctaacagacgaaaaccagtcatgttgccccgtttgtcagagagtttttcagacagaggctgagttacaagaagtcatcagtgatttgcagtctaaactgcgacttgctccagataaactcaagtcaacagaatcagagctaaaaaaaaaggaaaagcggcgtgatgaaatgctgggacttgtgcccatgaggtaagaatgggatttaccttcactgtacatgtagcagcacattgtaaaaggtacccatctcatgcctgggcagatggtagttactcagtaaggactctgagctggtatgccctgtcttatatcacttctatgataagaagattcaattattttgtttaaagataagcttgtttcctgtctttttttctttttcttttttttttctgagacagagtctctctctgtcacctaagctggagtgcagtggcatgatcttggctcattgcaacctccacctcccagaagcgattcccatgcctcagcctcttcagtagctgggattacaggcatgtaccaccacgcccagctaatttttgtaatttttagtagagatggagtttcaccatgttggccaggctaatctcgagctcctggcctcaaagtgattggcccacctcggcctcccaaagtgctgggatcacaggtgtgagcaccgtgcatagccagtaagcttatttctt

SEQ ID NO: 502 - DNA, 1190 bp, Homo sapiens
ggatcccacgtagcatctagttgttatttctccttaggctcctgcagtctgtaacaatctgtctttatctttcatgaccttaacacttttggtcaatatgaccagttcattagtagaatatttctcagtttgacaaacaccacagtaataattattgcaagcaagatctgtcagtggatactaaaatcagtaggcagaaagttgagaagcaagatatttacatagtctcaacatttctctcctaagatacttgttaattacaaagactaaaacagtaactttacagtggagaaacctggccaacaccatctaagccaagtgaataaggattaacatcatcagtaataagacatattgatatcatgattccatatccactgatatgataccctgaaaagaacacaatgtcacttctgtggtattcttcctaaaaatacataacctcagtctaactgtgagaaacatcagatactttatttttaattgtgttttctatttaggcaaagcataattgatttgaaggagaaggaaataccagaattaagaaacaaactgcagaatgtcaatagagacatacagcgcctaaagaacgacatagaagaacaagaaacactcttgggtacaataatgcctgaagaagaaagtgccaaagtatgcctgacagatgttacaattatggagaggttccaggtaagtttattgtagtttaaggcagaataaaacttgttccatggtggcttgaatttgaagtgtgagagttaaaaatagtagctagtattcaggtacaggttgtgtttagaattccccatcctgaatttcagataccctcagggagaaactgcttagtttacatccctgggtttaaactttttaattcataaatttaaaaattaagacagttctgtttgtttttcatctttagtcagcttccttttgtttacatcatttgaattgctgataattaatttcacttttatcctattaaactttgctaaaattgtatctagaaatggtttataagtttagatttaaaaaataaatgataagagcaattaatttttaaagattttgaataatgcagtaagtttattaaaggaaatcattttgttatattcttaagatggaacttaaagatgttgaaagaaaaattgcacaacaagcagctaagctacaaggaatagacttagatc

SEQ ID NO: 503 - DNA, 1127 bp, Homo sapiens
tacaataatgcctgaagaagaaagtgccaaagtatgcctgacagatgttacaattatggagaggttccaggtaagtttattgtagtttaaggcagaataaaacttgttccatggtggcttgaatttgaagtgtgagagttaaaaatagtagctagtattcaggtacaggttgtgtttagaattccccatcctgaatttcagataccctcagggagaaactgcttagtttacatccctgggtttaaactttttaattcataaatttaaaaattaagacagttctgtttgtttttcatctttagtcagcttccttttgtttacatcatttgaattgctgataattaatttcacttttatcctattaaactttgctaaaattgtatctagaaatggtttataagtttagatttaaaaaataaatgataagagcaattaatttttaaagattttgaataatgcagtaagtttattaaaggaaatcattttgttatattcttaagatggaacttaaagatgttgaaagaaaaattgcacaacaagcagctaagctacaaggaatagacttagatcgaactgtccaacaagtcaaccaggagaaacaagagaaacagcacaagttagacacaggtaatacagtctgtgtccttctgtactcatagagactttgacattgcgagcacatgccttttacagtcaattttatatctgttacatggacaacgaagttccttcctgtccacatatatttgctctttttttctgaaaagcatcacttctctttgttctcttactttgcacaacagattttgaacagtaggagagtatgaaataagctgtattctcttttccttttttttttttttaagatagagtttcacttttgtcgcccaggctggagtgcaatggtgcaatcttggctcactgcaacctccgcctcccgggttcaagtgattctcctgcctcaccctcctgagtagctggggttacaggcacacatcactatgcccagctaatttttgtattttttcgtagagatggggtttcactgtgtttgtcaggctgatctcgaactcctgacctcaggtgatccacctgcctcagtctcccaaagtgctgggattacaagt

SEQ ID NO: 504 - DNA, 1194 bp, Homo sapiens
cccaggctggagtgcaatggtgcaatcttggctcactgcaacctccgcctcccgggttcaagtgattctcctgcctcaccctcctgagtagctggggttacaggcacacatcactatgcccagctaatttttgtattttttcgtagagatggggtttcactgtgtttgtcaggctgatctcgaactcctgacctcaggtgatccacctgcctcagtctcccaaagtgctgggattacaagtgtgagccagtgcgcctggccatgagctgtattctttctcattcatacctgccctgtaagctttccctgtgagtggccagcagggaacatcaagctgatttgagaactagcagggttctcattgtatttttgttgcagtgggtggggcccacagaaatagcatttgtggattccatagaccgataaaaatgggaagaatgatacaaatagtattttctatgcccttacattaattactgtgataatatgtttttgtgtagtttctagtaagattgaattgaatcgtaagcttatacaggaccagcaggaacagattcaacatctaaaaagtacaacaaatgagctaaaatctgagaaacttcagatatccactaatttgcaacgtcgtcagcaactggaggagcagactgtggaattatccactgaagttcagtctttgtacagagagataaaggtaagaatatccatacatgttttttgtaaaattattttaattatttatttttatttttattttttgagacagtctcgttctgtcacccaggctggagtgcagtagcacgatctcggctcactgcaacctccatctcctgggttcaagtgattctcttgcctcagcctctggagtagctgggattacaggcgtgcaccaccatgcctggctaatttttgttcttttagtagagacgggttttcgccattggacaagctggtttcaaactcctgaactaaggtgatccgcctaccttggcctcccaaagtgctgggattacaggcgtgagccagcatgccccgccccattcttctcttttagagacagagtcttcatcagtcttccaagctggaatgcagtggtacagtcacagctcactcactgcagcctcgacctcctgagctcaagcaatcctcctgcctcagcctctcaagtagatgggactacaggcacacaccacc

SEQ ID NO: 505 - DNA, 1111 bp, Homo sapiens
gctaagcttaaggacagaagtgtttttaccatcatgttttcatctgaaaaagaaaagtctggactgaatgagctttcctattctttgatcatgcagcagtgacgggcacctataaaatcatgaaaactcatgcttgaagccacacgctaatataattgggagcacatggcctagattaagaatcaaattagtggttgatgcagtatagcatgcgtagtggttaagagcgtgaactctggagctggactgggttaaaatcttggctgcttcatttactggctgttgtgaccctggacaaatcattctctgtgtctgtttgctcgtttgaaatataggactgaaaatgatggtactgtcctcatagggtcattgaaaggagcaaatgagttgacttttagagcctggcacatagaaagtgcttttattaagactgtgaagtctgacccctaaagtaagataatggaatattatataatactttatcttttttatatttttaggatgctaaagagcaggtaagccctttggaaacaacattggaaaagttccagcaagaaaaagaagaattaatcaacaaaaaaaatacaagcaacaaaatagcacaggataaagtaagatttcatttatatatttacttatcaaatatctgtattaaacttatgttcatagcaccacgtcggacacttatttcacatgaaattaaatagcataagataaatagtattttcagattcatggtataattttgacattagaaattcttgttagaacaaggatttgatgtaaattattttgctgcttgatctacaatagaagttaagaaatgagactaattaatcaattcctataggtgagaaagggacttgtctgcgatcataaaattcagtagtggtggaaactggaacccaatgttcataacttcccagccagtgttttactgtgctctcctgttatgtgcccttaagtacaaccagtgtaaatttaatgaatatttttctacagctgaatgatattaaagagaaggttaaaaatattcatggctatatgaaagacattgagaattatattcaagatgggaaagacgactataagaaggtaatttaaaacttaa

SEQ ID NO: 506 - DNA, 1093 bp, Homo sapiens
tgctaaagagcaggtaagccctttggaaacaacattggaaaagttccagcaagaaaaagaagaattaatcaacaaaaaaaatacaagcaacaaaatagcacaggataaagtaagatttcatttatatatttacttatcaaatatctgtattaaacttatgttcatagcaccacgtcggacacttatttcacatgaaattaaatagcataagataaatagtattttcagattcatggtataattttgacattagaaattcttgttagaacaaggatttgatgtaaattattttgctgcttgatctacaatagaagttaagaaatgagactaattaatcaattcctataggtgagaaagggacttgtctgcgatcataaaattcagtagtggtggaaactggaacccaatgttcataacttcccagccagtgttttactgtgctctcctgttatgtgcccttaagtacaaccagtgtaaatttaatgaatatttttctacagctgaatgatattaaagagaaggttaaaaatattcatggctatatgaaagacattgagaattatattcaagatgggaaagacgactataagaaggtaatttaaaacttaaaattatttatttgattgtatttttattcatgtgcttaaagaattttcttttttgtagcaaaaagaaactgaacttaataaagtaatagctcaactaagtgaatgcgagaaacacaaagaaaagataaatgaagatatgagactcatgagacaagatattgatacacagaaggtaggtctgttttgcttatgatatcacttacacctatgacattcttttctatagttttattttcaatagaagatccattgaatagaaatgcaaaaaggaaagaggccaagcgtggtggctcacacctgtaatccctgcactttggaaggccgaggcgggtggatcacttgaggccaggagatcaagaccagcctggccaacacagtgaaaccctgtctgtactgaaaatacaaaaattagctggccgtggcggcgcgcacctgtagtcccagctactcgggaagctgaggcatgagaatcacctgaacctggg

SEQ ID NO: 507 - DNA, 1114 bp, Homo sapiens
gcaccacgtcggacacttatttcacatgaaattaaatagcataagataaatagtattttcagattcatggtataattttgacattagaaattcttgttagaacaaggatttgatgtaaattattttgctgcttgatctacaatagaagttaagaaatgagactaattaatcaattcctataggtgagaaagggacttgtctgcgatcataaaattcagtagtggtggaaactggaacccaatgttcataacttcccagccagtgttttactgtgctctcctgttatgtgcccttaagtacaaccagtgtaaatttaatgaatatttttctacagctgaatgatattaaagagaaggttaaaaatattcatggctatatgaaagacattgagaattatattcaagatgggaaagacgactataagaaggtaatttaaaacttaaaattatttatttgattgtatttttattcatgtgcttaaagaattttcttttttgtagcaaaaagaaactgaacttaataaagtaatagctcaactaagtgaatgcgagaaacacaaagaaaagataaatgaagatatgagactcatgagacaagatattgatacacagaaggtaggtctgttttgcttatgatatcacttacacctatgacattcttttctatagttttattttcaatagaagatccattgaatagaaatgcaaaaaggaaagaggccaagcgtggtggctcacacctgtaatccctgcactttggaaggccgaggcgggtggatcacttgaggccaggagatcaagaccagcctggccaacacagtgaaaccctgtctgtactgaaaatacaaaaattagctggccgtggcggcgcgcacctgtagtcccagctactcgggaagctgaggcatgagaatcacctgaacctgggaggcagaggttgcagtgagctgtgattgtaccactgcactctagcctgggcgacacagcgagactctgtctctaaaaagaaatgcaaaaagtaaagaaaaataattccaataacattcttacttcatttattttttatttttattttcagtaaaagactcatggtaaaagttcgaacataaaggcat

SEQ ID NO: 508 - DNA, 1128 bp, Homo sapiens
aaaagttggggaagacttcagtagtagtattgatctcttataatctttcaggtcagtaggctttatcatggggttcctatgcaaaatgatccactggggatgtaggtattaaaatatctagttatatttttaatttcaccatttaaaatgtctgttttgtatgtttttaatactttataagtaaataagtacacagatatatgctcaaatctttatgagactccccatcaaacagtagacctggtttttagattatggttgtgaaagagcagtaaaagctgcgctacaggaggtattacacttgtcactgtggatggggatgggccatccagattgccccagacctgtagattccttcacactggcttattctccctctgttgaatttcacatgattctaagtaagacagaaatggcacttgctgtcaccagttgcctgttacagatttcatgttagtaacttggttatttttgttaactaatttaatgtttacctttagatacaagaaaggtggctacaagataaccttactttaagaaaaagaaatgaggaactaaaagaagttgaagaagaaagaaaacaacatttgaaggaaatgggtcaaatgcaggttttgcaaatgaaaaggtatgcttttaaaataatcttcagtttaaataaacgtctttattactggaatgtgaagaatattaaatacctgttttaaaagaattttagcctcagcctggtatcctttgagagttactagaaggtgaacagtgttttgatacaattatatttcatggccttaagaactttattactgaagaagtgatatagaattggtaatcacactgtagtgatgggccttagttattcagtattgaacatgcttagcccccatacatctgctagcctgctgcacagaatagtggtactaagcataaagaatatggagctgtggaccttgtctgggtcagagcttgtacagtctataatattgtcaatggagttgttgccagagtgatttatccacagagattcattttagattttctcatttgtaattatgtgtccaccagagcatttcttttgaaagatgagcctcattcttcctttatctggtcttattgttacttattgtagtt

SEQ ID NO: 509 - DNA, 1225 bp, Homo sapiens
caagagaaattttgttttcatggaggaatctaaatttttaataagtattactgcagaaaattaatatatgatttaattcgtattgtgcctttgacatgagcaaaatgatgatgaagcctgttatccataacttcttagtgttgataattgtgcattctcagttcacaatcagaagattgtgaatttgtaatattaatcaccagagtgctttacttagcgtctaaaggccaggaactttatcagtgatcacatgctatgagggttctgtaatacacaaaattagctatttagcaacctatgtgcggcagagatatggaaggaagagaggggttttctttagtaccaaagccctaaataataagcaaggagagactctgttataatatactgattgctaaggagaatgatacttaacctatctaaagaaatctatgacttttccacttcaggttgttaaaagctaaaaaatggtcctcatttgtcatttttcttttttacagtgaacatcagaagttggaagagaacatagacaatataaaaagaaatcataatttggcattagggcgacagaaaggttatgaagaagaaattattcattttaagaaagaacttcgagaaccacaatttcgggatgctgaggaaaagtatagagaaatgatgattgttatgaggacaacagaacttgtgaacaaggatctggatatttattataagactcttgaccagtaagtattagactggggattttcttattgcagttaatattaactaacatactttagtcatcttttctctcatttttttctttttttcttttttattttttgagacagagtttcactcttgtttcccaggctggagtgcaatggcacgatctcagctcactgcaacctctgcctcccgggttcaaatgattctcctgcctcatcctcccaagtagctggtattacaggtgcatgccaccacgctgggctaatcttgtatttttagtagagacggggtttctccatgtaggtcaggctggtctcgaactcctgacctgaggtgatccacccgcctcggcctcccaaagtgctgggattacaggcatgagccactgcgcccagcccctcattttttctctttaaatatggtattttatgtataccatggattggaaaatatatgtatgtatgtatgtaaacacacactagcttaagttatgaagttaagatataaagcatat

SEQ ID NO: 510 - DNA, 1086 bp, Homo sapiens
gacaaggtggcagttcgattctcctattttccccatagactgcaggccccttggctaaccgtaaaccttctaccctttaactccctgtcgtccattcagcaggccttcctgtgacccgtgagtatcagtggaagcattccctccaataagttaccacggcctaagaaaaaagtctaaaaaattatgtttcctgaagttttcacagtatttaagtatttacgtaaaggagtatttgttgtatcctagagagtgaatatggagaagggtacccctggagcactagaaataagcctgccaattttcagtattagccaagcagcaaagttttgctgctgtttatttttgtagctcttactatattctacttttaccattgaaaatattgaggaagttatttatatttctattttttatatattatatattttatgtattttaatattactattacacataattattttttatatatatgaagtaccaatgacttccttttccagagcaataatgaaatttcacagtatgaaaatggaagaaatcaataaaattatacgtgacctgtggcgaagtacctatcgtggacaaggtgagtaccatggtgtatcacaaatgctctttccaaagccctctccgcagctcttccccttatgacctctcatcatgccagcattacctccctggacccctttctaagcatgtctttgagattttctaagaattcttatcttggcaacatcttgtagcaagaaaatgtaaagttttctgttccagagcctaacaggacttacatatttgactgcagtaggcattatatttagctgatgacataataggttctgtcatagtgtagatagggataagccaaaatgcaataagaaaaaccatccagaggaaactcttttttttttctttttcttttttttttttccagatggagtctcgcacttctctgtcacccgggctggagcgcagtggtgcaatcttggctcactgcaacctccacctcctgggttcaggtgattctcccacctcagcctcccgagtagtagctggaattacaggtgcgcgctcccacacctggctaat

SEQ ID NO: 511 - DNA, 1143 bp, Homo sapiens
gcgcagtggtgcaatcttggctcactgcaacctccacctcctgggttcaggtgattctcccacctcagcctcccgagtagtagctggaattacaggtgcgcgctcccacacctggctaattttttgtattcttagtagagatggggtttcaccatgttggccaggctggtctcaaactcctgccctcaggtgatctgcccaccttggcctcccagtgttgggtttacaggcgtgagccaccgcgcctggcctggaggaaactcttaacagggaaactaagaaagagttgaggctgaggaactggggcatctgggttgcttctggccagaccaccaggctcttgaatcctcccagccagagaaagagtttccacaccagccattgttttcctctggtaatgtcagcctcatctgttgttcctaggcttacttgatatgtttgtaaatgacaaaaggctacagagcataggttcctctaaaatattcttcttcctgtgtcagatattgaatacatagaaatacggtctgatgccgatgaaaatgtatcagcttctgataaaaggcggaattataactaccgagtggtgatgctgaagggagacacagccttggatatgcgaggacgatgcagtgctggacaaaaggcaggtatctcaaaagcctggggagccaactcacccaagtaactgaaagagagaaacaaacatcagtgcagtggaagcacccaaggctacacctgaatggtgggaagctctttgctgctatataaaatgaatcaggctcagctactattattacactctcctgaagctaaccaacatttcctgcaacattatgtagacttttaaaagaagggcctgaagcattctcacaggataggctaaatgtagaacaagaagctgaagacccgttagagttttcatggcactccttatcagaataaggtcactgtctcatcagttataagacataccactattttatgtgccagcaggaatgaaaaaatgcaattataaccataagatgtttcagaatcaatgacataatagtattgcaaaccagattctagcttaagctagaatgaatattccagtatagtaaggagtctcattaagaaagtagcccctcatagaactaagtccct

SEQ ID NO: 512 - DNA, 1134 bp, Homo sapiens
cttttttattctctcagtctcaggattatacacaagaatatggaaatttaaaggtagcagagaaaaagtgagaggctctagaaaacgtgtcgaagttttctaacagatcccattatcaggcaaatagccaggtcaagaatttttaaggttgctcatcttacaggattattaaaattacagataaatggcattgtctctgtttctagcctttggtctcaagttggttgtagctgatgtaattttttatgtgagagcatcagcgttgttctgagcattttgttttgtggtgaatgataggctgagatcatgcaggttctccttctggaggacataagaatctggtcccagtgctgggctctcccagagggcagtgctttacctaacagtgaacctgtgacgtttcccacttttccctgctgaaaagatcatgtcaggactgcttgcctgccatgagatgagaaggtctgtgctgggcttctcacataggggcttttttccaggtattagcctcactcatcattcgcctggccctggctgaaacgttctgcctcaactgtggcatcattgccttggatgagccaacaacaaatcttgaccgagaaaacattgaatctcttgcacatgctctggttgagtaagtatctcttgcacatgctctggttgagtaagtatctcacatttggggacaggttgtgatagttcttcaaaaccaagagagttctgtgatgaaaacgttctctagctgtgttccccacttcttggggaagccagttggtgccaggccctgggctttaccttttgatagtaattcttcagatccctcctaaaggaactagatggtgaacagcagccccagacacatcctgcagctccccaagtgtgttcacagggagagagtcactgtgaggggttcctggcctggttttcctgtaaacctaccagaggaacccacatgtcatgcacagcaattagcatgccctgctaagacatctgcaggtagtggtagtgggtttaggactgtctccccagctttccacatgtgtcagagaactgtgaggaatgacagagctcttactcaaaaagcttatttgagattaggtaaagtccagtgagggtaaaattgcacacctttta

SEQ ID NO: 513 - DNA, 3444 bp, Homo sapiens
ctagtgactggtggtggcagaattctaagtagacccagctcttaagaaagcagtgttattccccttacctgtagtttgtctttattacttttaaatttttcttccagagaaaagtagtaacaggtcaggaaaatcccaggcgaaggagtaagccttctatagttgaacagtttggatattaaggaaaactcaataaaatatttatacctgctttagtgagaacttctgatctggaagaaactagttcttgtattcctgtgagtccctaagccagacctaagtgaggagtcaggccatgtgtccctactgtctggagaggagaagagactcctgcctggctggcctgaaggcctggggccacccctccacttcctgcagggtagctggggccctgacacacagcacaagttcatgtgtctgacaaggtttgcggtgacttttcaaatcaaagaaggggttatgctctttactaataatatgttctgaatatattgttgcaggataataaaaagtcgctcacagcagcgtaacttccagcttctggtaatcactcatgatgaagattttgtggagcttttaggacgttctgaatatgtggagaaattctacaggattaaaaagaacatcgatcagtgctcagagattgtgaaatgcagtgttagctccctgggattcaatgttcattaaaaatatccaagatttaaatgccatagaaatgtaggtcctcagaaagtgtataataagaaacttatttctcatatcaacttagtcaataagaaaatatattctttcaaaggaacattgtgtctaggattttggatgttgagaggttctaaaatcatgaaacttgtttcactgaaaattggacagattgcctgtttctgatttgctgctcttcatcccattccaggcagcctctgtcaggccttcagggttcagcagtacagccgagactcgactctgtgcctccctccccagtgcaaatgcatgcttcttctcaaagcactgttgagaaggagataattactgccttgaaaatttatggttttggtatttttttaaatcatagttaaatgttacctctgaatttacttccttgcatgtggtttgaaaaactgagtattaatatctgaggatgaccagaaatggtgagatgtatgtttggctctgcttttaactttataaatccagtgacctctctctctgggacttggtttccccaactaaaatttgaagtagttgaatggggtctcaaagtttgacaggaaccttaagtaatcatctaagtcagtacccaccaccttcttctcctacatatcccttccagatggtcatccagactcagagctctctctacagagaggaaattctccactgtgcacacccacctttggaaagctctgaccacttgaggcctgatctgcccatcgtgaagaagcctgtaacactcctctgcgtctatcctgtgtagcatactggcttcaccatcaatcctgattcctctctaagtgggcattgccatgtggaaggcaagccaggctcactcacagagtcaaggcctgctccctgtagggtccaaccagacctggaagaacaggcctctccatttgctcttcagatgccacttctaagaaaagcctaatcacagtttttcctggaattgccagctgacatcttgaatccttccattccacacagaatgcaaccaagtcacacgcttttgaattatgctttgtagagttttgtcattcagagtcagccaggaccataccgggtcttgattcagtcacatggcatggttttgtgccatctgtagctataatgagcatgtttgcctagacagcttttctcaactgggtccagaagagaattaagccctaaggtcctaaggcatctatctgtgctaggttaaatggttggcccccaaagatagacaggtcctgatttctagaacccgtgactgttactttatacagcaaaggaaactttgcagatgtgattaaagctaaggaccttaagacagagtatcctgggggtggtggtggggtgggggggggtcctaaatgtaatcacgagtaagattaagagcaaatcaattctagtcatatattaaacatccacaataaccaagatatttttatcccaagaatgcaagatttcagaaaatgaaaaatctgttgataaatccatcactataataaaaccgaaggtgaaaaaaattctgaaaaaattctagcagctatatttgataaaattcaacatctcctagctttagcaaactcacagttttgcaaataatattttcttaatgttatctgttgctaaatcaaaattaaacagtcatcttaactgcaaaataaaacatttctcagtaaatattaaagccagttaccttctatcaacatgttaatgaaagtgctagttgttgcagcaaagaataacaaaggcaatacacgatcaatataggcagtgaaacaaaagtatcatttgcaagttaaaacagacttcccaattttaaatctggtttccccctgaatatgtggcatccttggcagcacttctgagagtggctgctttcattccaagaagcccatgggtttggaggtgggataggtgcctttctggcttctcattgctgcttctagatcagtctccaaatatcccccttccccacattggaatgaatagccatcacagcatggatggaggttagaatgagccagactgcctgggctcaaatcctagcacaccactcactagctggggaccttgagcaagttatttgtcctgttttctgtttccttatatgtaaaagtgggtaaaatggtacatattttgtagggttgttatgaagattgaatgacattatttacaaactgcttagaactgcttgccacctactaaatactgtgtaagtgttcaagaaaaagctgtcttcatttcactcttgttgcagttatctttcattcccagcttggtcactccctcttatttgttgaagagtttagctcccggttcagtgtcaccccattactaataatcattgctgatttcaatatccaagtgatggtctaatacaactccttggcctctcagtcttttttattttttgaggtggagtcttgctctgtcacccaggctggagtgcaatggcaccatctcagctcactgcaacctctgcctccctgatacaagcaatcctcctgcctcagcctcccaagtagctaggattacaggcatgtaccaccacaccaggctaatttttgtattttagtagagacagggtttcgccttgttggccaggctggtcttgaacgtctggcctcaagtgatctgcctaccttggcctccctcagcccctttttgtttcctccagtgagaagatactcagttctatggtcttattctagagccccgtccttttaataacaataactgcacccc

SEQ ID NO: 514 - DNA, 1500 bp, Homo sapiens
aggcaatacacgatcaatataggcagtgaaacaaaagtatcatttgcaagttaaaacagacttcccaattttaaatctggtttccccctgaatatgtggcatccttggcagcacttctgagagtggctgctttcattccaagaagcccatgggtttggaggtgggataggtgcctttctggcttctcattgctgcttctagatcagtctccaaatatcccccttccccacattggaatgaatagccatcacagcatggatggaggttagaatgagccagactgcctgggctcaaatcctagcacaccactcactagctggggaccttgagcaagttatttgtcctgttttctgtttccttatatgtaaaagtgggtaaaatggtacatattttgtagggttgttatgaagattgaatgacattatttacaaactgcttagaactgcttgccacctactaaatactgtgtaagtgttcaagaaaaagctgtcttcatttcactcttgttgcagttatctttcattcccagcttggtcactccctcttatttgttgaagagtttagctcccggttcagtgtcaccccattactaataatcattgctgatttcaatatccaagtgatggtctaatacaactccttggcctctcagtcttttttattttttgaggtggagtcttgctctgtcacccaggctggagtgcaatggcaccatctcagctcactgcaacctctgcctccctgatacaagcaatcctcctgcctcagcctcccaagtagctaggattacaggcatgtaccaccacaccaggctaatttttgtattttagtagagacagggtttcgccttgttggccaggctggtcttgaacgtctggcctcaagtgatctgcctaccttggcctccctcagcccctttttgtttcctccagtgagaagatactcagttctatggtcttattctagagccccgtccttttaataacaataactgcacccctccaaaatctcagttttaagcatctcactctccaataaccccatggtgtctacaattttcctgtggtcctcaaccccagcaattctttgaccccactgagatttcaatccattgattctatggctttttcacaggttgtttccctgatgcctgtacttctctccttattcaacttaaattccatggctcatcattatgtcaccctccactgcattgtactcaaactgtcccgacaatccccagccctactggaatccagctctgcctcctccctgcaacacctgcacatcccgtttcctttgctgtttcctcctcatttccctggcccctcaatgtcacaggttttagtactcagagtctgcacctcttttcttctctgtgctcacttatttggtgatctcatccagtctcatagctttaaattatcttagtttgggttctcccagaagcagagcgtaaaacaatgcttcacgtgaaagtaatcagtaggaaattgggga

SEQ ID NO: 515 - DNA, 1281 bp, Homo sapiens
gtgcggagtttggctgctccggggttagcaggtgagcctgcgatgcgcgggaagacgttccgctttgaaatgcagcgggatttggtgagtttcccgctgtctccagcggtgcgggtgaagctggtgtctgcggggttccagactgctgaggaactcctagaggtgaaaccctccgagcttagcaaagaagttgggatatctaaagcagaagccttagaaactctgcaaattatcagaagagaatgtctcacaaataaaccaagatatgctggtacatctgagtcacacaagaagtgtacagcactggaacttcttgagcaggagcatacccagggcttcataatcaccttctgttcagcactagatgatattcttgggggtggagtgcccttaatgaaaacaacagaaatttgtggtgcaccaggtgttggaaaaacacaattatgtatgcagttggcagtagatgtgcagataccagaatgttttggaggagtggcaggtgaagcagtttttattgatacagagggaagttttatggttgatagagtggtagaccttgctactgcctgcattcagcaccttcagcttatagcagaaaaacacaagggagaggaacaccgaaaagctttggaggatttcactcttgataatattctttctcatatttattattttcgctgtcgtgactacacagagttactggcacaagtttatcttcttccagatttcctttcagaacactcaaaggttcgactagtgatagtggatggtattgcttttccatttcgtcatgacctagatgacctgtctcttcgtactcggttattaaatggcctagcccagcaaatgatcagccttgcaaataatcacagattagctgtaattttaaccaatcagatgacaacaaagattgatagaaatcaggccttgcttgttcctgcattaggggaaagttggggacatgctgctacaatacggctaatctttcattgggaccgaaagcaaaggttggcaacattgtacaagtcacccagccagaaggaatgcacagtactgtttcaaatcaaacctcagggatttagagatactgttgttacttctgcatgttcattgcaaacagaaggttccttgagcacccggaaacggtcacgagacccagaggaagaattataacccagaaacaaatctcaaagtgtacaaatttattgatgttgtgaaatcaatgtgtacaagtggacttgttaccttaaagtataaataaacacactatggcatgaatga

SEQ ID NO: 516 - DNA, 592 bp, Homo sapiens
gtgcggagtttggctgctccggggttagcaggtgagcctgcgatgcgcgggaagacgttccgctttgaaatgcagcgggatttggtgagtttcccgctgtctccagcggtgcgggtgaagctggtgtctgcggggttccagactgctgaggaactcctagaggtgaaaccctccgagcttagcaaagaagttgggatatctaaagcagaagccttagaaactctgcaaattatcagaagagaatgtctcacaaataaaccaagatatgctggtacatctgagtcacacaagaagtgtacagcactggaacttcttgagcaggagcatacccagggcttcataatcaccttctgttcagcactagatgatattcttgggggtggagtgcccttaatgaaaacaacagaaatttgtggtgcaccaggtgttggaaaaacacaattatggtaaaataaagtgttctccttttaagggtgggtttaataacatattatgaaagtagtattttgtactatcgtcaggaaaccaaataagatatatatgtgctcttaattttaagtgtgtatgtgcattaaacaaaaattagcttaca

SEQ ID NO: 517 - DNA, 1500 bp, Homo sapiens
ggttgcagtgagccgacatcgtgccactgcactccatcatgggcaacacagtgagactctgtctcaaaaaaaaaaaaaaaaaaatcgccaataggtagggaataagttaccccctgctaaataagttacactcacctaggcaaggaaggaactcataaaccaccttctaaactgcttgccttcctccccgaagttctgtaatttagaggcggtcactaccactgcttgaacaccccttcccaagtctgtaccacaaaaggagctcttgtgtagcccagcccctccttctcaggaccccaggagcccagacacactaatggggacattagttgcttacttttccagctactgcttaagctaggcaggccatgaagaaataacggtctcagtaacctccatgctcgggatacgactcccgggaagacgtgggtgggtgcggggaatgcggactgatccctcccagcggccgttgggggctggcccacaatccctcgcgagggcgggaaaagcaatgtggtcgttgcggggggggggggtcagaaaagggggacggtcagcgggaagagccaagagactgcaactctacaaagagcacgcagattaattctaatgattgttccctgagcttttcacaccaaaataatggtaactggctagtgtgtgcccgttacgctcactactcccactcgagatcattcctattaatgactctgaggcttcacctaacaggccacggtggaggcaaggaaatgtggcgtggagaacccactgggcctggctctccgtcctatggtctccgtccatcgttttacagtcagggtgtacatttgatgaggaatctctaaatgggattttggggaatcaaaacggaatggtgcataagtgtgaaaatttacaagactgcgcaaagctgcaaggcccggagccccgtgcggccaggccgcagagccggccccttccgctttacgtctgacgtcacgccgcacgccccagcgagggcgtgcggagtttggctgctccggggttagcaggtgagcctgcgatgcgcgggaagacgttccgctttgaaatgcagcgggatttggtgagtttcccgctgtctccagcggtgcgggtgaagctggtgtctgcggggttccagactgctgaggaactcctagaggtgaaaccctccgagcttagcaaaggtaacgactcctgatggcaagctgaggcacaccggccgccgtcagcgccgcctcagtcttcgttctctcgcctcggccttcagcccagtctccgttagattctgcttcctcccacgtccatgtttacagcgtgaaagagctcctcgactccacttacaagttgtctgaatggttaggagaactgtggtcgtgaaaacatttactaattgcttttcctctggcaatgcctgctgaatgctttgaggattgtctcatttaaccctcaacccgcttacgtagattattatattcagtatatggatgagagaactga

SEQ ID NO: 518 - DNA, 1187 bp, Homo sapiens
cgggaaaagcaatgtggtcgttgcggggggggggggtcagaaaagggggacggtcagcgggaagagccaagagactgcaactctacaaagagcacgcagattaattctaatgattgttccctgagcttttcacaccaaaataatggtaactggctagtgtgtgcccgttacgctcactactcccactcgagatcattcctattaatgactctgaggcttcacctaacaggccacggtggaggcaaggaaatgtggcgtggagaacccactgggcctggctctccgtcctatggtctccgtccatcgttttacagtcagggtgtacatttgatgaggaatctctaaatgggattttggggaatcaaaacggaatggtgcataagtgtgaaaatttacaagactgcgcaaagctgcaaggcccggagccccgtgcggccaggccgcagagccggccccttccgctttacgtctgacgtcacgccgcacgccccagcgagggcgtgcggagtttggctgctccggggttagcaggtgagcctgcgatgcgcgggaagacgttccgctttgaaatgcagcgggatttggtgagtttcccgctgtctccagcggtgcgggtgaagctggtgtctgcggggttccagactgctgaggaactcctagaggtgaaaccctccgagcttagcaaaggtaacgactcctgatggcaagctgaggcacaccggccgccgtcagcgccgcctcagtcttcgttctctcgcctcggccttcagcccagtctccgttagattctgcttcctcccacgtccatgtttacagcgtgaaagagctcctcgactccacttacaagttgtctgaatggttaggagaactgtggtcgtgaaaacatttactaattgcttttcctctggcaatgcctgctgaatgctttgaggattgtctcatttaaccctcaacccgcttacgtagattattatattcagtatatggatgagagaactgatatcttggggagcttaggtaacttttcatgctaactgggttaggaaatactggagtcagaattggttgtctaatttttgctgttccaagatccaaggggtaagggttaaatttcagaaatgcaggattttgtgtaggactagagacactaagaatgagaaagagagtagaatccccggaatcttgag

SEQ ID NO: 519 - DNA, 1404 bp, Homo sapiens
taattctttatgtgatgactaagaaaacgaatacctttattaagctgaatttttttttttttttttttgagacggagtctcgcactgtcatccaggctggaatgcagtggtgcgatccaggctggagtgcagtggtgcaggttcaagtgattgtcctgcctcagcctcccaagtagctggaattataacgcgtgccaccatgcccggctaatttttgtatttttagtagagacggagtttcaccatgttggccaggctggtcttcaactcctgacctcaggtgatctggctgcctcagcctcccaaagtactgggattttaggcatgagccactgtgtccggccaaactgaaaaattaaatggttgatagaatgttgcatttttatgtttctccactcctagcatcactgttgtctacaaattaataaagacaatcgattatcatgttacacttttaaatctctaaaattagggttctttttttcttattttactttcagaagttgggatatctaaagcagaagccttagaaactctgcaaattatcagaagagaatgtctcacaaataaaccaagatatgctggtacatctgagtcacacaagaagtgtacagcactggaacttcttgagcaggagcatacccagggcttcataatcaccttctgttcagcactagatgatattcttgggggtggagtgcccttaatgaaaacaacagaaatttgtggtgcaccaggtgttggaaaaacacaattatggtaaaataaagtgttctccttttaagggtgggtttaataacatattatgaaagtagtattttgtactatcgtcaggaaaccaaataagatatatatgtgctcttaattttaagtgtgtatgtgcattaaacaaaaattagcttactatttgtgttacttcattatcccttcttgataaatgtatgcaattattctgatgtgaaaaagtgtttcttttgcaaattgtactgcagtcataaggttaaacaggaagtttctgcgttattcattcctgagactatatttgaaagtcagatgtttgaaagtagatttatggctaggggtagtggctcatgcctataatcccagcactttgggaggccgaggcaggaggattgcttgagcccaggagtttgaggcctgcctgggcaacatagtgagacctcgtctctactaaaaatggaaaattagctgagtgtggtggcacatgcctgtggtcctagctacttgggaggctgaggcaggaggatagcttgagccggggaggtcaaaactgcagtgagccttaatcacatcactgggcagcagagtgagaccctatctcaaaaaaaaaagaggccggggatggtggctcacacctgtaatcccagcactttgggaggctga

SEQ ID NO: 520 - DNA, 1500 bp, Homo sapiens
tcactgttgtctacaaattaataaagacaatcgattatcatgttacacttttaaatctctaaaattagggttctttttttcttattttactttcagaagttgggatatctaaagcagaagccttagaaactctgcaaattatcagaagagaatgtctcacaaataaaccaagatatgctggtacatctgagtcacacaagaagtgtacagcactggaacttcttgagcaggagcatacccagggcttcataatcaccttctgttcagcactagatgatattcttgggggtggagtgcccttaatgaaaacaacagaaatttgtggtgcaccaggtgttggaaaaacacaattatggtaaaataaagtgttctccttttaagggtgggtttaataacatattatgaaagtagtattttgtactatcgtcaggaaaccaaataagatatatatgtgctcttaattttaagtgtgtatgtgcattaaacaaaaattagcttactatttgtgttacttcattatcccttcttgataaatgtatgcaattattctgatgtgaaaaagtgtttcttttgcaaattgtactgcagtcataaggttaaacaggaagtttctgcgttattcattcctgagactatatttgaaagtcagatgtttgaaagtagatttatggctaggggtagtggctcatgcctataatcccagcactttgggaggccgaggcaggaggattgcttgagcccaggagtttgaggcctgcctgggcaacatagtgagacctcgtctctactaaaaatggaaaattagctgagtgtggtggcacatgcctgtggtcctagctacttgggaggctgaggcaggaggatagcttgagccggggaggtcaaaactgcagtgagccttaatcacatcactgggcagcagagtgagaccctatctcaaaaaaaaaagaggccggggatggtggctcacacctgtaatcccagcactttgggaggctgaggcgggtggatcacctgagatcaggagttcaagaccagcctagtcaacatggcgaaaccccatctctactaaaaataaaaaaattagccaggcatggtggttcacgcctatagtctcagctcctcgggaggctgaggcaggagaatcgcttgtacttgggaggtggaggttgcagtgagccgagatcatgccactgcactccagcttgggtgacagagcaagactctgtctcaaaagaaaaaaaaaaaaggtagatttatgtataataaggggctccattttgagaggcctggaaatgattaaaatattcttaattggctgggcgcagtggctgacgcttgtaatcccagcactttgggaggccaaggcaggcagatcatgaggtcaggagatcgagaccatcctggctaacacggtgaaaccccgtttctactaaaaaatacaaagaattagccgggcgtggtggcgggtgcttgtagtcctagctactcgggcagctg

SEQ ID NO: 521 - DNA, 2402 bp, Homo sapiens
ctggaacccggaagcggcagcgcggcgcgacccggcgggcgggctctgggcgcgggaatcccggcggatcccgggcgggcggatgacccccagccctacccttggtgccgcctcctcctctctcctttctcctccggcagccagcgcgcctgtgtcctctctaggaaggggtaggggaggggcgtctggagaggaccccccgcgaatgcccacgtgacgtgcagtccccctggggctgttccggcctgcggggaacatgggcgtgctcagggtcggactgtgccctggccttaccgaggagatgatccagcttctcaggagccacaggatcaagacagtggtggacctggtttctgcagacctggaagaggtagctcagaaatgtggcttgtcttacaaggccctggttgccctgaggcgggtgctgctggctcagttctcggctttccccgtgaatggcgctgatctctacgaggaactgaagacctccactgccatcctgtccactggcattggcagtcttgataaactgcttgatgctggtctctatactggagaagtgactgaaattgtaggaggcccaggtagcggcaaaactcaggtatgtctctgtatggcagcaaatgtggcccatggcctgcagcaaaacgtcctatatgtagattccaatggagggctgacagcttcccgcctcctccagctgcttcaggctaaaacccaggatgaggaggaacaggcagaagctctccggaggatccaggtggtgcatgcatttgacatcttccagatgctggatgtgctgcaggagctccgaggcactgtggcccagcaggtgactggttcttcaggaactgtgaaggtggtggttgtggactcggtcactgcggtggtttccccacttctgggaggtcagcagagggaaggcttggccttgatgatgcagctggcccgagagctgaagaccctggcccgggaccttggcatggcagtggtggtgaccaaccacataactcgagacagggacagcgggaggctcaaacctgccctcggacgctcctggagctttgtgcccagcactcggattctcctggacaccatcgagggagcaggagcatcaggcggccggcgcatggcgtgtctggccaaatcttcccgacagccaacaggtttccaggagatggtagacattgggacctgggggacctcagagcagagtgccacattacagggtgatcagacatgacctgtgctgttgtttgggaaacagggaagcattggggacccctcccaacttttcttcccagtaacgcctgctgtttactgccacctggcactggtgactacagacgttctcaggctggccagaagagacatcttgggttccttggcctcactctctgtaagcatataaaccacaggcgaaagaggatgctgcattgcgaggacccagaaattcatactggtgccacgtttccttcccttatttctaacgtgtatgtttctggtggaaaccaagttcaccctggctgggagcatctctgatgaggcatgctggcgactggatggataatcctgtgcatcaccattgtgtcctgtgctccctcctagcgcagtggccaagccgggaaagcctctaacttgcctttgctgctgctgccttttttttcttttgtctctgcctttccatttgttagatgggggcccactcttccttagctctgtctctgagttactgggtggaaataagcttataaatgaaatactcttcttcatctctgttttgctcttaaaaatataaaaaggcaattccccgagccctagagccacctgatttccccttagaaggctgtttttcagtttcccccagtgaggcccaaagaacagtttattcctcctttcctcttgctgatttggtttcagacctgcctgcatcaccatgactaggtgagaacgtgtgggctcgctgcagttccagggatataatttaacagaaagggagggtatgacctgctcctggtgaatccagccactcatttaatatgcatggtgccctgtggggcccctccacagtacagcataaccagaggtgctgaaccatggccttgcccataaacagacagaggagaatttgcacagtaaatagagccagctgggaaaattgatgctgacgtaaataatacatggcaaatctagtcctttatgcagaaattcattgctggtggctccaagatgcaatataattacacctctcttcctgccagctgtaccacagctagtgccctagtgtatgaaataatccctctgtctttcaccagcactgtggccatccgtctgagagccatgaccctggctgggaggggacgaagacaccagggaatggaaaataaaaggaaaagtacaga

SEQ ID NO: 522 - DNA, 2082 bp, Homo sapiens
ctggaacccggaagcggcagcgcggcgcgacccggcgggcgggctctgggcgcgggaatcccggcggatcccgggcgggcggatgacccccagccctacccttggtgccgcctcctcctctctcctttctcctccggcagccagcgcgcctgtgtcctctctaggaaggggtaggggaggggcgtctggagaggaccccccgcgaatgcccacgtgacgtgcagtccccctggggctgttccggcctgcggggaacatgggcgtgctcagggtcggactgtgccctggccttaccgaggagatgatccagcttctcaggagccacaggatcaagacagtggtggacctggtttctgcagacctggaagaggtagctcagaaatgtggcttgtcttacaaggcagaagctctccggaggatccaggtggtgcatgcatttgacatcttccagatgctggatgtgctgcaggagctccgaggcactgtggcccagcaggtgactggttcttcaggaactgtgaaggtggtggttgtggactcggtcactgcggtggtttccccacttctgggaggtcagcagagggaaggcttggccttgatgatgcagctggcccgagagctgaagaccctggcccgggaccttggcatggcagtggtggtgaccaaccacataactcgagacagggacagcgggaggctcaaacctgccctcggacgctcctggagctttgtgcccagcactcggattctcctggacaccatcgagggagcaggagcatcaggcggccggcgcatggcgtgtctggccaaatcttcccgacagccaacaggtttccaggagatggtagacattgggacctgggggacctcagagcagagtgccacattacagggtgatcagacatgacctgtgctgttgtttgggaaacagggaagcattggggacccctcccaacttttcttcccagtaacgcctgctgtttactgccacctggcactggtgactacagacgttctcaggctggccagaagagacatcttgggttccttggcctcactctctgtaagcatataaaccacaggcgaaagaggatgctgcattgcgaggacccagaaattcatactggtgccacgtttccttcccttatttctaacgtgtatgtttctggtggaaaccaagttcaccctggctgggagcatctctgatgaggcatgctggcgactggatggataatcctgtgcatcaccattgtgtcctgtgctccctcctagcgcagtggccaagccgggaaagcctctaacttgcctttgctgctgctgccttttttttcttttgtctctgcctttccatttgttagatgggggcccactcttccttagctctgtctctgagttactgggtggaaataagcttataaatgaaatactcttcttcatctctgttttgctcttaaaaatataaaaaggcaattccccgagccctagagccacctgatttccccttagaaggctgtttttcagtttcccccagtgaggcccaaagaacagtttattcctcctttcctcttgctgatttggtttcagacctgcctgcatcaccatgactaggtgagaacgtgtgggctcgctgcagttccagggatataatttaacagaaagggagggtatgacctgctcctggtgaatccagccactcatttaatatgcatggtgccctgtggggcccctccacagtacagcataaccagaggtgctgaaccatggccttgcccataaacagacagaggagaatttgcacagtaaatagagccagctgggaaaattgatgctgacgtaaataatacatggcaaatctagtcctttatgcagaaattcattgctggtggctccaagatgcaatataattacacctctcttcctgccagctgtaccacagctagtgccctagtgtatgaaataatccctctgtctttcaccagcactgtggccatccgtctgagagccatgaccctggctgggaggggacgaagacaccagggaatggaaaataaaaggaaaagtacagaaaaaaaaaaaaaaaaa

SEQ ID NO: 523 - DNA, 2462 bp, Homo sapiens
ctggaacccggaagcggcagcgcggcgcgacccggcgggcgggctctgggcgcgggaatcccggcggatcccgggcgggcggatgacccccagccctacccttggtgccgcctcctcctctctcctttctcctccggcagccagcgcgcctgtgtcctctctaggaaggggtaggggaggggcgtctggagaggaccccccgcgaatgcccacgtgacgtgcagtccccctggggctgttccggcctgcggggaacatgggcgtgctcagggtcggactgtgccctggccttaccgaggagatgatccagcttctcaggagccacaggatcaagacagtggtggacctggtttctgcagacctggaagaggtagctcagaaatgtggcttgtcttacaagacatggagggcgcactcaagtgggaacctgggaggactgcagctgcctcaggtccccgcagggagatcgtggagtggggtcaggaatgctctgaagaaggcaggacttgggcatggaggaacagatggactttcgctgaatgctttcgatgaacgaggcactgcggtcagcacttcacgtcttgataaactgcttgatgctggtctctatactggagaagtgactgaaattgtaggaggcccaggtagcggcaaaactcaggtatgtctctgtatggcagcaaatgtggcccatggcctgcagcaaaacgtcctatatgtagattccaatggagggctgacagcttcccgcctcctccagctgcttcaggctaaaacccaggatgaggaggaacaggcagaagctctccggaggatccaggtggtgcatgcatttgacatcttccagatgctggatgtgctgcaggagctccgaggcactgtggcccagcaggtgactggttcttcaggaactgtgaaggtggtggttgtggactcggtcactgcggtggtttccccacttctgggaggtcagcagagggaaggcttggccttgatgatgcagctggcccgagagctgaagaccctggcccgggaccttggcatggcagtggtggtgaccaaccacataactcgagacagggacagcgggaggctcaaacctgccctcggacgctcctggagctttgtgcccagcactcggattctcctggacaccatcgagggagcaggagcatcaggcggccggcgcatggcgtgtctggccaaatcttcccgacagccaacaggtttccaggagatggtagacattgggacctgggggacctcagagcagagtgccacattacagggtgatcagacatgacctgtgctgttgtttgggaaacagggaagcattggggacccctcccaacttttcttcccagtaacgcctgctgtttactgccacctggcactggtgactacagacgttctcaggctggccagaagagacatcttgggttccttggcctcactctctgtaagcatataaaccacaggcgaaagaggatgctgcattgcgaggacccagaaattcatactggtgccacgtttccttcccttatttctaacgtgtatgtttctggtggaaaccaagttcaccctggctgggagcatctctgatgaggcatgctggcgactggatggataatcctgtgcatcaccattgtgtcctgtgctccctcctagcgcagtggccaagccgggaaagcctctaacttgcctttgctgctgctgccttttttttcttttgtctctgcctttccatttgttagatgggggcccactcttccttagctctgtctctgagttactgggtggaaataagcttataaatgaaatactcttcttcatctctgttttgctcttaaaaatataaaaaggcaattccccgagccctagagccacctgatttccccttagaaggctgtttttcagtttcccccagtgaggcccaaagaacagtttattcctcctttcctcttgctgatttggtttcagacctgcctgcatcaccatgactaggtgagaacgtgtgggctcgctgcagttccagggatataatttaacagaaagggagggtatgacctgctcctggtgaatccagccactcatttaatatgcatggtgccctgtggggcccctccacagtacagcataaccagaggtgctgaaccatggccttgcccataaacagacagaggagaatttgcacagtaaatagagccagctgggaaaattgatgctgacgtaaataatacatggcaaatctagtcctttatgcagaaattcattgctggtggctccaagatgcaatataattacacctctcttcctgccagctgtaccacagctagtgccctagtgtatgaaataatccctctgtctttcaccagcactgtggccatccgtctgagagccatgaccctggctgggaggggacgaagacaccagggaatggaaaataaaaggaaaagtacaga

SEQ ID NO: 524 - DNA, 1500 bp, Homo sapiens
atgtggatgtgaagtccagccctgtgccgcctagctgggtgacctttggcaagtgatttaacctcactgaacctcagtttcttcattggtgaaacagggataaaaaatagcgcctccctcacagatttgtgatgagataaccatgtaaagttttatttcttcctatggatgaggcaaagcaaaggacatttaaaaataccaaatcatatctttttgtgtgtgttctatataaccaaggtttcttgcccttaaaaaaaataaaaaataaaataaaaaatagaggccgggcacggtggctcacacctgtaatccccgcacttcgggagaccaaggcaggaggattgtttgagcccagtagttcgagacctgtgtgggcaacatggtgtaaccccattttgtagaggcgaaacctctacaaaaaatacaaaaattagctgggcaaggtggcacgtgactgtagtcccagctactcaggaggctgaggcaggaggatcgcttgaacccaggaggtcgaggctgcaaagctgagatctcaccagggcactccagcctgggcggccgatcgagaccctgtctcaaccaaaacaaaacaaacttttgaaaaatagacgcaggtgccctctggatgctttgctgcttcttgacacctgtcgtataatctgtaatgatgtgatttctgcgattccttttcattgtctgtctttcccttgctcacagtaagctccctgggggtaagggcgggtcgtcttgtgtcgcattttgtctccagcggagatccgttccgtttggaacggaagctggcgcacagaaggctctttagaaggtcggtgtgtgtgttgcggcagaaggtagaggccgaatgtggccgcgggtggcgtgttgagcgcggagggggtcgtgggactcgggaacctgtgcaggcggtggagaggggcgcagcggctctgccccgtgcggcccgcagatggcgctgcaggccaggtcctcgccgcgcgccagcctggaacccggaagcggcagcgcggcgcgacccggcgggcgggctctgggcgcgggaatcccggcggatcccgggcgggcggatgacccccagccctacccttggtgccgcctcctcctctctcctttctcctccggcagccagcgcgcctgtgtcctctctaggaaggggtaggggaggggcgtctggagaggaccccccgcgaatgcccacgtgacgtgcagtccccctggggctgttccggcctgcggggaacatgggcgtgctcagggtcggactgtgccctggccttaccgaggagatgatccagcttctcaggagccacaggatcaagacaggtgaccgggtgtgcgcgtgccagggagccgcgcgggcctcgcacaacctgggcaggccccgagggctggcgcactgccctggcatacctgcagggcgcttcccctccattcctagagggccgcgcttctggagaggctcaggaagggtgggcgtggggagcc

SEQ ID NO: 525 - DNA, 1338 bp, Homo sapiens
acccaggaggtcgaggctgcaaagctgagatctcaccagggcactccagcctgggcggccgatcgagaccctgtctcaaccaaaacaaaacaaacttttgaaaaatagacgcaggtgccctctggatgctttgctgcttcttgacacctgtcgtataatctgtaatgatgtgatttctgcgattccttttcattgtctgtctttcccttgctcacagtaagctccctgggggtaagggcgggtcgtcttgtgtcgcattttgtctccagcggagatccgttccgtttggaacggaagctggcgcacagaaggctctttagaaggtcggtgtgtgtgttgcggcagaaggtagaggccgaatgtggccgcgggtggcgtgttgagcgcggagggggtcgtgggactcgggaacctgtgcaggcggtggagaggggcgcagcggctctgccccgtgcggcccgcagatggcgctgcaggccaggtcctcgccgcgcgccagcctggaacccggaagcggcagcgcggcgcgacccggcgggcgggctctgggcgcgggaatcccggcggatcccgggcgggcggatgacccccagccctacccttggtgccgcctcctcctctctcctttctcctccggcagccagcgcgcctgtgtcctctctaggaaggggtaggggaggggcgtctggagaggaccccccgcgaatgcccacgtgacgtgcagtccccctggggctgttccggcctgcggggaacatgggcgtgctcagggtcggactgtgccctggccttaccgaggagatgatccagcttctcaggagccacaggatcaagacaggtgaccgggtgtgcgcgtgccagggagccgcgcgggcctcgcacaacctgggcaggccccgagggctggcgcactgccctggcatacctgcagggcgcttcccctccattcctagagggccgcgcttctggagaggctcaggaagggtgggcgtggggagccaagctctaaaacagggtagagattcctactgtgtgcagggcaccgcgccggctcctgcagctttgttatttcacactggcctcctgagacggcctgccggggggtagaattgacaccccatttgacagatgaggaaaaaccaagtgtgggaggccccagtcctctctgccaatccgctatacgtgttttgttttcagtggtggacctggtttctgcagacctggaagaggtagctcagaaatgtggcttgtcttacaaggtgagctcctgatctccacattccaaacctgagtgtctttttaaaaagtccatcccaagccagctgggcgcggtggctc

SEQ ID NO: 526 - DNA, 1062 bp, Homo sapiens
ccccgcgaatgcccacgtgacgtgcagtccccctggggctgttccggcctgcggggaacatgggcgtgctcagggtcggactgtgccctggccttaccgaggagatgatccagcttctcaggagccacaggatcaagacaggtgaccgggtgtgcgcgtgccagggagccgcgcgggcctcgcacaacctgggcaggccccgagggctggcgcactgccctggcatacctgcagggcgcttcccctccattcctagagggccgcgcttctggagaggctcaggaagggtgggcgtggggagccaagctctaaaacagggtagagattcctactgtgtgcagggcaccgcgccggctcctgcagctttgttatttcacactggcctcctgagacggcctgccggggggtagaattgacaccccatttgacagatgaggaaaaaccaagtgtgggaggccccagtcctctctgccaatccgctatacgtgttttgttttcagtggtggacctggtttctgcagacctggaagaggtagctcagaaatgtggcttgtcttacaaggtgagctcctgatctccacattccaaacctgagtgtctttttaaaaagtccatcccaagccagctgggcgcggtggctcatgcctgtaatcccagcactttgggaggccgaggcgggtgggtcacttggagtcagaagtcaggagttcgagaccatccaggccaacatggtgaaaccctgtccctactaaaaatacaaaaattagctgggtgtggtggcccacgcctacaatcccagctactcgggaggctgaggaaggagaatcatttgagcccgggaggcagaggttgcagtgagccgagatcgtgctactgcactccaatctgggcgacagagtgagaccctgtctgaaacaacaacaataacaaaagtccatcccaagccaaagggagcagagggttctcagatattgagaagtagggtgaatgacaccctgggatgccagcttctacgggcaatttgttgctgagcagtctggggccctttggcaggccctggtt

SEQ ID NO: 527 - DNA, 1179 bp, Homo sapiens
agccttggtggcagagcgagactctctcaaaaaaaaggagcagttatgtcccgccacgttgtttggtgggttggggaagagttgcaaagacgacagacgtttgctggccaagtgagtcttgacctttttcctggtctgtttgttcagaaattgatgaataactgccaccataaaggtctttggattggtgtggccctttctgtttccttaacacattctcttggcagggttcatgcagtgtggtgcttgctttccctggttgggggtctgagtctgtgatccatcaagcactggctaagggcctgctgggtgcttggtatgtgcagatgatacatacacgaatgaggcaaggcccctgcccttaaggcctctagttgggtgtaggggaaaatcaagtgaatacaagagagctgtaagcaccgagggaggcaacggtaaggagggagtggtgaacaggaagccgattggccttgggcttagggagtttataaatccaacagacatggagggcgcactcaagtgggaacctgggaggactgcagctgcctcaggtccccgcagggagatcgtggagtggggtcaggaatgctctgaagaaggcaggacttgggcatggaggaacagatggactttcgctgaatgctttcgatgaacgaggcactgcggtcagcacttcacggtacattatttcatttattcgtcacaaccaccaatgagcatgttactgtttaaatcatcattctaggccgggcgcagtggctcacgcctgtgatcacagcactttgggaggctgaggtgggcggatcatgaggtcaggaaatcgagactgtcctggctaacacggtaaaaccccgtctctactaaaagtacaaaatattagctgggcgtggtggcgggcgcctgtagtcccagctactcggaaggctgaggcaggagaatagcatgaacccgggaagcggagcttgcagtgagcggagatcgcaccactgcactccagcctgggcaacagggcaagactccatctcaaaaaaataaaataaaataaaataaaataaaaataaatcatcattctataggtgaagaaattgggactcaggttaaatgacttgttcaagattgtgcagttagcaaacggcagaccagttatttgagttcatgcttgtcacactcctaagtcta

SEQ ID NO: 528 - DNA, 1119 bp, Homo sapiens
tcttacaaggtgagctcctgatctccacattccaaacctgagtgtctttttaaaaagtccatcccaagccagctgggcgcggtggctcatgcctgtaatcccagcactttgggaggccgaggcgggtgggtcacttggagtcagaagtcaggagttcgagaccatccaggccaacatggtgaaaccctgtccctactaaaaatacaaaaattagctgggtgtggtggcccacgcctacaatcccagctactcgggaggctgaggaaggagaatcatttgagcccgggaggcagaggttgcagtgagccgagatcgtgctactgcactccaatctgggcgacagagtgagaccctgtctgaaacaacaacaataacaaaagtccatcccaagccaaagggagcagagggttctcagatattgagaagtagggtgaatgacaccctgggatgccagcttctacgggcaatttgttgctgagcagtctggggccctttggcaggccctggttgccctgaggcgggtgctgctggctcagttctcggctttccccgtgaatggcgctgatctctacgaggaactgaagacctccactgccatcctgtccactggcattggcaggtttgtgtgtgtacttggggaagaaggagagaggcaggaggatggggcctcctctcagctctgcttttgatgcttgagtctagacgggaggggttttttttttaaccaataatggatgggaaggaaaggggtcaggacatctgaattcttatcctataacagggttatggggtatctcagccttggcactattgatatttagggacaggtaattatttgttggggggtggaggctgtcctgtgcagtgtaggatgtttagcagcatctctggcctctgcccactagatgccagtagcaccagccctgctccagttgtaaccatcaaaaatgtctcctgacatggctaaatgtcccctgggaggcacaattgcctctggttgagaagcattgtcctataacacaagctgtcagtatctcattattttcaccatcttctctggccctacttcttattttacttaaggatatggcaagagagaacatttactgagtgcctact

SEQ ID NO: 529 - DNA, 1082 bp, Homo sapiens
tgaaaccccgtctctaattaaaaaaactagtcgggtatggtggcgggcacctgtagtcccagctactcgggaggctgaggcaggaaaatcacttgagcctgggaggtggaggttgcagtgagtagagatcacgccactgcactccagcactccggcctggacaacaaagagagactccgtctcaaaaaaaaaaaaaaaaaaaaaaaaaaaggaaacccacagggcctgagatgaaaaatgaagggagaaccttctgatggggtggcagaggcctctctggagagctgatctttaagagtggagggatgaagagagaccagagaaggcacatttgggcattccctccttaccagaagaaaacaccaggagaagcctcctggccagtgatgttcaaagacagaaccagtgcttgaaagaaatgtcttacttttcttcttggtaccttttcccctgtcttcctcctaacctcttgtgttgattttcttctcttctgccatcagtcttgataaactgcttgatgctggtctctatactggagaagtgactgaaattgtaggaggcccaggtagcggcaaaactcaggtacatgtgaggccagcagtcaggaggatttaggggtgagggtggtagatgcatagcccagggtccctgggggagcttcagcgtactaatgggttcagagcccaacagagagaagatgggtaataaggaatggggtcgggactcagcccatttgtgttgctggaatctgggcaaggtttggtggggagctcccatctggaccctctctgaagtgtcaagttcatccaatgcccccacccccaggtatgtctctgtatggcagcaaatgtggcccatggcctgcagcaaaacgtcctatatgtagattccaatggagggctgacagcttcccgcctcctccagctgcttcaggctaaaacccaggatgaggaggaacaggtaagggcaggatgctgggttccattgagattctgacacaggaaaaccccattatcccttaacattgtaagaatttgggttgaatagtcattccttgccttcaaacttgctgttctattaat

SEQ ID NO: 530 - DNA, 1135 bp, Homo sapiens
gcacatttgggcattccctccttaccagaagaaaacaccaggagaagcctcctggccagtgatgttcaaagacagaaccagtgcttgaaagaaatgtcttacttttcttcttggtaccttttcccctgtcttcctcctaacctcttgtgttgattttcttctcttctgccatcagtcttgataaactgcttgatgctggtctctatactggagaagtgactgaaattgtaggaggcccaggtagcggcaaaactcaggtacatgtgaggccagcagtcaggaggatttaggggtgagggtggtagatgcatagcccagggtccctgggggagcttcagcgtactaatgggttcagagcccaacagagagaagatgggtaataaggaatggggtcgggactcagcccatttgtgttgctggaatctgggcaaggtttggtggggagctcccatctggaccctctctgaagtgtcaagttcatccaatgcccccacccccaggtatgtctctgtatggcagcaaatgtggcccatggcctgcagcaaaacgtcctatatgtagattccaatggagggctgacagcttcccgcctcctccagctgcttcaggctaaaacccaggatgaggaggaacaggtaagggcaggatgctgggttccattgagattctgacacaggaaaaccccattatcccttaacattgtaagaatttgggttgaatagtcattccttgccttcaaacttgctgttctattaatacatctcgtattccttaagccacccctgttgatgccatcatcccatttgggatgctactcacactgattcttccaggaaaccctcccaactctttgcatgccctaaaccagggctggcaaacaccaagctttgtgtttccagtccatttctcacctgtgagagacatcactaatcagtcatatccctctttcctgctgagttctgagtactttacagctcagcacccaggcagccaccactgtgacaactgaccattagacaaagctcatttgccaccctggacctgagtccttgcatccaggtgcctcttccttctcagccttaccttgacccccctactccctcttatccaaagtccttgcttttcttttccaccg

SEQ ID NO: 531 - DNA, 1096 bp, Homo sapiens
gcaggatgctgggttccattgagattctgacacaggaaaaccccattatcccttaacattgtaagaatttgggttgaatagtcattccttgccttcaaacttgctgttctattaatacatctcgtattccttaagccacccctgttgatgccatcatcccatttgggatgctactcacactgattcttccaggaaaccctcccaactctttgcatgccctaaaccagggctggcaaacaccaagctttgtgtttccagtccatttctcacctgtgagagacatcactaatcagtcatatccctctttcctgctgagttctgagtactttacagctcagcacccaggcagccaccactgtgacaactgaccattagacaaagctcatttgccaccctggacctgagtccttgcatccaggtgcctcttccttctcagccttaccttgacccccctactccctcttatccaaagtccttgcttttcttttccaccgcttcaggcagaagctctccggaggatccaggtggtgcatgcatttgacatcttccagatgctggatgtgctgcaggagctccgaggcactgtggcccagcaggtgagcctgctgttctgcccctccttgcttaattcagctttctaggtgctatctctgtgggcaggtgtcctactacagactgtttggaaatgcagatgtgcaatctggtgactccaactatgcttgctactcccaggatggaattcccgagcacctaaatcacatacctcattgtttacatgttcatcttccctgctgaacagtaaagccccctgagtggaaggatcatgtcatatttatgtctgcattccccactaggtgagtgaggaatacttttagctgcaagtaatagaggttgtctgacagagacttgaagcttgaggacatttaattatgtcacatgagttgggaggttggcaggtccatgctatcagggcaatagatttgtgtgtctgattttcttgttcttcccctcatggttgcaaagaggctgccaaagctccaagcatcttgtcttcacacatccacatccatattcaaggcagtaaaagatagatggt

SEQ ID NO: 532 - DNA, 1091 bp, Homo sapiens
atgcagcggtgtgatctcagttcactgcaacccccgcctcccagtttcaagcgattctcctgcctcagcctcctgagtagctgggattacaggtgtgcaccaccacgcccagctaatttttgtatgtttagtggagacggggtttcaccatgttggccaggctggtctcgaactcctgacctcaagtgatccaccgccttggcctcccaaagtgctgggattacaggcgtgagccactgcgcccagccactttagtgtagttttgatgtcctgtgatttaaaccctttctttctacccaagtcttcattgaagtctgttacacatgccaatgggacgagggagacattgctgctgatgacattctgtgatgcccgtgcagcttgctgtatttgggatgggggggctatttcttactagttttagatagaaaagcaagcttgtcctgtaatgtgtcctagaggctgacaggttcatgagtgcttcccccacattccttcaggtgactggttcttcaggaactgtgaaggtggtggttgtggactcggtcactgcggtggtttccccacttctgggaggtcagcagagggaaggtgagtgatgtggcagagcctggggccagtggaatgtgacctcgcctcccagctctggagtctggtctctggccagccccatccctggttccccactgccctccctctctgcttctcctcctcctgcaggcttggccttgatgatgcagctggcccgagagctgaagaccctggcccgggaccttggcatggcagtggtggtgaggaagcaggcttggccaatgaacttgatttctagttattgcgagctctttatttcccttaaatgtcagcttctgaaccccaaagtggccctttaggaaagggacatatcccagcttccctgggtcagctacagctttgcaccataaatagctaagggaatcaggaatcgtcttgttgtttttttgttgttttgttttgtttctacattttttctttttagtcaggtttattgaggtataatttacatagagtaactttctccttgtttgaagtttgactaatggatatagttgtat

SEQ ID NO: 533 - DNA, 1071 bp, Homo sapiens
ttacaggcgtgagccactgcgcccagccactttagtgtagttttgatgtcctgtgatttaaaccctttctttctacccaagtcttcattgaagtctgttacacatgccaatgggacgagggagacattgctgctgatgacattctgtgatgcccgtgcagcttgctgtatttgggatgggggggctatttcttactagttttagatagaaaagcaagcttgtcctgtaatgtgtcctagaggctgacaggttcatgagtgcttcccccacattccttcaggtgactggttcttcaggaactgtgaaggtggtggttgtggactcggtcactgcggtggtttccccacttctgggaggtcagcagagggaaggtgagtgatgtggcagagcctggggccagtggaatgtgacctcgcctcccagctctggagtctggtctctggccagccccatccctggttccccactgccctccctctctgcttctcctcctcctgcaggcttggccttgatgatgcagctggcccgagagctgaagaccctggcccgggaccttggcatggcagtggtggtgaggaagcaggcttggccaatgaacttgatttctagttattgcgagctctttatttcccttaaatgtcagcttctgaaccccaaagtggccctttaggaaagggacatatcccagcttccctgggtcagctacagctttgcaccataaatagctaagggaatcaggaatcgtcttgttgtttttttgttgttttgttttgtttctacattttttctttttagtcaggtttattgaggtataatttacatagagtaactttctccttgtttgaagtttgactaatggatatagttgtatccagtcttgtgaccccaccaaaaggtcccccaggcccaggcaaccactgatctgttttccatcccaatagtttggccttttccagagcttcatataaatggatctttttgctattgaagtaactttttctgcttatgaggtagtttttttaaagtctgcatgcttctcatagaaaggatagaaaataaatatgattcaaa

SEQ ID NO: 534 - DNA, 1165 bp, Homo sapiens
ctgtatctatgctttttgactactctaggaacctcatatacatggaatcatatggtatttactttttgtgactggagtatttcacttagcataatgtccagaaggttcatccaccttgtagcatgtgtcagactttccttccttttaaaggctgagtgtctgggcgtggtggcccacacttgtaatcccagcactttgggaggctgaggctggcggactgcatgagctcaagagtttgagaccagcctggaaagcatggtgacatgtgccccatcgccttctggttcgggtcaaacctgaggcatcgagatttagtggaaagagcggggcacaagtcaggaggcccaggttctagttccagacctgccattaggttttgtaaccttggggaagttatttctctgtgctaggcctctgttttcctctccgtaaaatgaagcggtagtaatcgatgtcctctatactagcattatggatctgtaagtctgtttctgctgcaggtgaccaaccacataactcgagacagggacagcgggaggctcaaacctgccctcggacgctcctggagctttgtgcccagcactcggattctcctggacaccatcgagggagcaggagcatcaggcggccggcgcatggcgtgtctggccaaatcttcccgacaggtgagccagccccaggaagatgccagtaatcttgggccctggagggtggtttccatacccacagatgtcttcgagaagaactctttagaggctgaaaccttgcaactaaagaagctacccacttgggttgcttaactccactgactccttacttcttcttccagccaacaggtttccaggagatggtagacattgggacctgggggacctcagagcagagtgccacattacagggtgatcagacatgacctgtgctgttgtttgggaaacagggaagcattggggacccctcccaacttttcttcccagtaacgcctgctgtttactgccacctggcactggtgactacagacgttctcaggctggccagaagagacatcttgggttccttggcctcactctctgtaagcatataaaccacaggcgaaagaggatgctgcattgcgaggacccagaaattcatactggtgccacgtttccttcccttatttctaacgtgt

SEQ ID NO: 535 - DNA, 2245 bp, Homo sapiens
cacaagtcaggaggcccaggttctagttccagacctgccattaggttttgtaaccttggggaagttatttctctgtgctaggcctctgttttcctctccgtaaaatgaagcggtagtaatcgatgtcctctatactagcattatggatctgtaagtctgtttctgctgcaggtgaccaaccacataactcgagacagggacagcgggaggctcaaacctgccctcggacgctcctggagctttgtgcccagcactcggattctcctggacaccatcgagggagcaggagcatcaggcggccggcgcatggcgtgtctggccaaatcttcccgacaggtgagccagccccaggaagatgccagtaatcttgggccctggagggtggtttccatacccacagatgtcttcgagaagaactctttagaggctgaaaccttgcaactaaagaagctacccacttgggttgcttaactccactgactccttacttcttcttccagccaacaggtttccaggagatggtagacattgggacctgggggacctcagagcagagtgccacattacagggtgatcagacatgacctgtgctgttgtttgggaaacagggaagcattggggacccctcccaacttttcttcccagtaacgcctgctgtttactgccacctggcactggtgactacagacgttctcaggctggccagaagagacatcttgggttccttggcctcactctctgtaagcatataaaccacaggcgaaagaggatgctgcattgcgaggacccagaaattcatactggtgccacgtttccttcccttatttctaacgtgtatgtttctggtggaaaccaagttcaccctggctgggagcatctctgatgaggcatgctggcgactggatggataatcctgtgcatcaccattgtgtcctgtgctccctcctagcgcagtggccaagccgggaaagcctctaacttgcctttgctgctgctgccttttttttcttttgtctctgcctttccatttgttagatgggggcccactcttccttagctctgtctctgagttactgggtggaaataagcttataaatgaaatactcttcttcatctctgttttgctcttaaaaatataaaaaggcaattccccgagccctagagccacctgatttccccttagaaggctgtttttcagtttcccccagtgaggcccaaagaacagtttattcctcctttcctcttgctgatttggtttcagacctgcctgcatcaccatgactaggtgagaacgtgtgggctcgctgcagttccagggatataatttaacagaaagggagggtatgacctgctcctggtgaatccagccactcatttaatatgcatggtgccctgtggggcccctccacagtacagcataaccagaggtgctgaaccatggccttgcccataaacagacagaggagaatttgcacagtaaatagagccagctgggaaaattgatgctgacgtaaataatacatggcaaatctagtcctttatgcagaaattcattgctggtggctccaagatgcaatataattacacctctcttcctgccagctgtaccacagctagtgccctagtgtatgaaataatccctctgtctttcaccagcactgtggccatccgtctgagagccatgaccctggctgggaggggacgaagacaccagggaatggaaaataaaaggaaaagtacagaaatgatcaggattggttactggccacatcttttaaaggaaggtcatctttcttggttagagagcctgttgtgtaattaatcagttatgtcttggctgcaggaaaggagggtccgagttacactcagaaagtaatgacatttagaggtgatgaatgcaacagggatagaatcatggaggattgggaaggagtggcaaactggcaccagggtgttggattcaggacagggttggtaagcctaagcctgggggaatcctagcgcttgctttcacagaagacctcaggagaaattaatcttcagtatctttataccatgggtgattggcacattcctgcaaccacagtaagatgcaatacatgaagctggaaattgcaaattcttgccactcaaggtactatttgggcatcttcagcccacagcagacatgaccaatcgggcacaagcactcttttttgtggaagtcaaagtgtttttagaagtttttctcaatatagcactccag

SEQ ID NO: 536 - DNA, 1500 bp, Homo sapiens
gctgatttggtttcagacctgcctgcatcaccatgactaggtgagaacgtgtgggctcgctgcagttccagggatataatttaacagaaagggagggtatgacctgctcctggtgaatccagccactcatttaatatgcatggtgccctgtggggcccctccacagtacagcataaccagaggtgctgaaccatggccttgcccataaacagacagaggagaatttgcacagtaaatagagccagctgggaaaattgatgctgacgtaaataatacatggcaaatctagtcctttatgcagaaattcattgctggtggctccaagatgcaatataattacacctctcttcctgccagctgtaccacagctagtgccctagtgtatgaaataatccctctgtctttcaccagcactgtggccatccgtctgagagccatgaccctggctgggaggggacgaagacaccagggaatggaaaataaaaggaaaagtacagaaatgatcaggattggttactggccacatcttttaaaggaaggtcatctttcttggttagagagcctgttgtgtaattaatcagttatgtcttggctgcaggaaaggagggtccgagttacactcagaaagtaatgacatttagaggtgatgaatgcaacagggatagaatcatggaggattgggaaggagtggcaaactggcaccagggtgttggattcaggacagggttggtaagcctaagcctgggggaatcctagcgcttgctttcacagaagacctcaggagaaattaatcttcagtatctttataccatgggtgattggcacattcctgcaaccacagtaagatgcaatacatgaagctggaaattgcaaattcttgccactcaaggtactatttgggcatcttcagcccacagcagacatgaccaatcgggcacaagcactcttttttgtggaagtcaaagtgtttttagaagtttttctcaatatagcactccagggggccactaccagtcagttggagttggtattcaaggtggagtctggttgccgtctctgccctgttcccattatgtagtgagttcaggtacttaatacctaactgaggaccctaggactgcagtttgagatcatctggggccaggcacagtggctcacacctataatggtagcactttgggagcctgaggcgggaggatcacttgagcccaggagtttaacagtttaaaatcagcctgggcaacatgatgagacatcgtttctacaaaaaaattttttaaattagctaggcattgtgatgtgcacctgtggtccctgctacttgggagcctgaggcaggagaatcgcttgaaccttggaggttgtggctgcagtgagccctgatcgcaccactacaccccagcctgggtaacagagcaagaccctgtctcaaggaaaaaaaaaatcatctggcccatcctgttacttaacagagaaggtacctgaggctcaaaaaggatg

SEQ ID NO: 537 - DNA, 5629 bp, Homo sapiens
agtcccgcgaccgaagcagggcgcgcagcagcgctgagtgccccggaacgtgcgtcgcgcccccagtgtccgtcgcgtccgccgcgccccgggcggggatggggcggccagactgagcgccgcacccgccatccagacccgccggccctagccgcagtccctccagccgtggccccagcgcgcacgggcgatggcgaaggcgacgtccggtgccgcggggctgcgtctgctgttgctgctgctgctgccgctgctaggcaaagtggcattgggcctctacttctcgagggatgcttactgggagaagctgtatgtggaccaggcggccggcacgcccttgctgtacgtccatgccctgcgggacgcccctgaggaggtgcccagcttccgcctgggccagcatctctacggcacgtaccgcacacggctgcatgagaacaactggatctgcatccaggaggacaccggcctcctctaccttaaccggagcctggaccatagctcctgggagaagctcagtgtccgcaaccgcggctttcccctgctcaccgtctacctcaaggtcttcctgtcacccacatcccttcgtgagggcgagtgccagtggccaggctgtgcccgcgtatacttctccttcttcaacacctcctttccagcctgcagctccctcaagccccgggagctctgcttcccagagacaaggccctccttccgcattcgggagaaccgacccccaggcaccttccaccagttccgcctgctgcctgtgcagttcttgtgccccaacatcagcgtggcctacaggctcctggagggtgagggtctgcccttccgctgcgccccggacagcctggaggtgagcacgcgctgggccctggaccgcgagcagcgggagaagtacgagctggtggccgtgtgcaccgtgcacgccggcgcgcgcgaggaggtggtgatggtgcccttcccggtgaccgtgtacgacgaggacgactcggcgcccaccttccccgcgggcgtcgacaccgccagcgccgtggtggagttcaagcggaaggaggacaccgtggtggccacgctgcgtgtcttcgatgcagacgtggtacctgcatcaggggagctggtgaggcggtacacaagcacgctgctccccggggacacctgggcccagcagaccttccgggtggaacactggcccaacgagacctcggtccaggccaacggcagcttcgtgcgggcgaccgtacatgactataggctggttctcaaccggaacctctccatctcggagaaccgcaccatgcagctggcggtgctggtcaatgactcagacttccagggcccaggagcgggcgtcctcttgctccacttcaacgtgtcggtgctgccggtcagcctgcacctgcccagtacctactccctctccgtgagcaggagggctcgccgatttgcccagatcgggaaagtctgtgtggaaaactgccaggcattcagtggcatcaacgtccagtacaagctgcattcctctggtgccaactgcagcacgctaggggtggtcacctcagccgaggacacctcggggatcctgtttgtgaatgacaccaaggccctgcggcggcccaagtgtgccgaacttcactacatggtggtggccaccgaccagcagacctctaggcaggcccaggcccagctgcttgtaacagtggaggggtcatatgtggccgaggaggcgggctgccccctgtcctgtgcagtcagcaagagacggctggagtgtgaggagtgtggcggcctgggctccccaacaggcaggtgtgagtggaggcaaggagatggcaaagggatcaccaggaacttctccacctgctctcccagcaccaagacctgccccgacggccactgcgatgttgtggagacccaagacatcaacatttgccctcaggactgcctccggggcagcattgttgggggacacgagcctggggagccccgggggattaaagctggctatggcacctgcaactgcttccctgaggaggagaagtgcttctgcgagcccgaagacatccaggatccactgtgcgacgagctgtgccgcacggtgatcgcagccgctgtcctcttctccttcatcgtctcggtgctgctgtctgccttctgcatccactgctaccacaagtttgcccacaagccacccatctcctcagctgagatgaccttccggaggcccgcccaggccttcccggtcagctactcctcttccggtgcccgccggccctcgctggactccatggagaaccaggtctccgtggatgccttcaagatcctggaggatccaaagtgggaattccctcggaagaacttggttcttggaaaaactctaggagaaggcgaatttggaaaagtggtcaaggcaacggccttccatctgaaaggcagagcagggtacaccacggtggccgtgaagatgctgaaagagaacgcctccccgagtgagcttcgagacctgctgtcagagttcaacgtcctgaagcaggtcaaccacccacatgtcatcaaattgtatggggcctgcagccaggatggcccgctcctcctcatcgtggagtacgccaaatacggctccctgcggggcttcctccgcgagagccgcaaagtggggcctggctacctgggcagtggaggcagccgcaactccagctccctggaccacccggatgagcgggccctcaccatgggcgacctcatctcatttgcctggcagatctcacaggggatgcagtatctggccgagatgaagctcgttcatcgggacttggcagccagaaacatcctggtagctgaggggcggaagatgaagatttcggatttcggcttgtcccgagatgtttatgaagaggattcctacgtgaagaggagccagggtcggattccagttaaatggatggcaattgaatccctttttgatcatatctacaccacgcaaagtgatgtatggtcttttggtgtcctgctgtgggagatcgtgaccctagggggaaacccctatcctgggattcctcctgagcggctcttcaaccttctgaagaccggccaccggatggagaggccagacaactgcagcgaggagatgtaccgcctgatgctgcaatgctggaagcaggagccggacaaaaggccggtgtttgcggacatcagcaaagacctggagaagatgatggttaagaggagagactacttggaccttgcggcgtccactccatctgactccctgatttatgacgacggcctctcagaggaggagacaccgctggtggactgtaataatgcccccctccctcgagccctcccttccacatggattgaaaacaaactctatggcatgtcagacccgaactggcctggagagagtcctgtaccactcacgagagctgatggcactaacactgggtttccaagatatccaaatgatagtgtatatgctaactggatgctttcaccctcagcggcaaaattaatggacacgtttgatagttaacatttctttgtgaaaggtaatggactcacaaggggaagaaacatgctgagaatggaaagtctaccggccctttctttgtgaacgtcacattggccgagccgtgttcagttcccaggtggcagactcgtttttggtagtttgttttaacttccaaggtggttttacttctgatagccggtgattttccctcctagcagacatgccacaccgggtaagagctctgagtcttagtggttaagcattcctttctcttcagtgcccagcagcacccagtgttggtctgtgtccatcagtgaccaccaacattctgtgttcacatgtgtgggtccaacacttactacctggtgtatgaaattggacctgaactgttggatttttctagttgccgccaaacaaggcaaaaaaatttaaacatgaagcacacacacaaaaaaggcagtaggaaaaatgctggccctgatgacctgtccttattcagaatgagagactgcggggggggcctgggggtagtgtcaatgcccctccagggctggaggggaagaggggccccgaggatgggcctgggctcagcattcgagatcttgagaatgatttttttttaatcatgcaacctttccttaggaagacatttggttttcatcatgattaagatgattcctagatttagcacaatggagagattccatgccatctttactatgtggatggtggtatcagggaagagggctcacaagacacatttgtcccccgggcccaccacatcatcctcacgtgttcggtactgagcagccactacccctgatgagaacagtatgaagaaagggggctgttggagtcccagaattgctgacagcagaggctttgctgctgtgaatcccacctgccaccagcctgcagcacaccccacagccaagtagaggcgaaagcagtggctcatcctacctgttaggagcaggtagggcttgtactcactttaatttgaatcttatcaacttactcataaagggacaggctagctagctgtgttagaagtagcaatgacaatgaccaaggactgctacacctctgattacaattctgatgtgaaaaagatggtgtttggctcttatagagcctgtgtgaaaggcccatggatcagctcttcctgtgtttgtaatttaatgctgctacaagatgtttctgtttcttagattctgaccatgactcataagcttcttgtcattcttcattgcttgtttgtggtcacagatgcacaacactcctccagtcttgtgggggcagcttttgggaagtctcagcagctcttctggctgtgttgtcagcactgtaacttcgcagaaaagagtcggattaccaaaacactgcctgctcttcagacttaaagcactgataggacttaaaatagtctcattcaaatactgtattttatataggcatttcacaaaaacagcaaaattgtggcattttgtgaggccaaggcttggatgcgtgtgtaatagagccttgtggtgtgtgcgcacacacccagagggagagtttgaaaaatgcttattggacacgtaacctggctctaatttgggctgtttttcagatacactgtgataagttcttttacaaatatctatagacatggtaaacttttggttttcagatatgcttaatgatagtcttactaaatgcagaaataagaataaactttctcaaattattaaaaatgcctacacagtaagtgtgaattgctgcaacaggtttgttctcaggagggtaagaactccaggtctaaacagctgacccagtgatggggaatttatccttgaccaatttatccttgaccaataacctaattgtctattcctgagttataaaagtccccatccttattagctctactggaattttcatacacgtaaatgcagaagttactaagtattaagtattactgagtattaagtagtaatctgtcagttattaaaatttgtaaaatctatttatgaaaggtcattaaaccagatcatgttcctttttttgtaatcaaggtgactaagaaaatcagttgtgtaaataaaatcatgtatcataaaaaaaaaaaaaaaa

SEQ ID NO: 538 - DNA, 4174 bp, Homo sapiens
agtcccgcgaccgaagcagggcgcgcagcagcgctgagtgccccggaacgtgcgtcgcgcccccagtgtccgtcgcgtccgccgcgccccgggcggggatggggcggccagactgagcgccgcacccgccatccagacccgccggccctagccgcagtccctccagccgtggccccagcgcgcacgggcgatggcgaaggcgacgtccggtgccgcggggctgcgtctgctgttgctgctgctgctgccgctgctaggcaaagtggcattgggcctctacttctcgagggatgcttactgggagaagctgtatgtggaccaggcggccggcacgcccttgctgtacgtccatgccctgcgggacgcccctgaggaggtgcccagcttccgcctgggccagcatctctacggcacgtaccgcacacggctgcatgagaacaactggatctgcatccaggaggacaccggcctcctctaccttaaccggagcctggaccatagctcctgggagaagctcagtgtccgcaaccgcggctttcccctgctcaccgtctacctcaaggtcttcctgtcacccacatcccttcgtgagggcgagtgccagtggccaggctgtgcccgcgtatacttctccttcttcaacacctcctttccagcctgcagctccctcaagccccgggagctctgcttcccagagacaaggccctccttccgcattcgggagaaccgacccccaggcaccttccaccagttccgcctgctgcctgtgcagttcttgtgccccaacatcagcgtggcctacaggctcctggagggtgagggtctgcccttccgctgcgccccggacagcctggaggtgagcacgcgctgggccctggaccgcgagcagcgggagaagtacgagctggtggccgtgtgcaccgtgcacgccggcgcgcgcgaggaggtggtgatggtgcccttcccggtgaccgtgtacgacgaggacgactcggcgcccaccttccccgcgggcgtcgacaccgccagcgccgtggtggagttcaagcggaaggaggacaccgtggtggccacgctgcgtgtcttcgatgcagacgtggtacctgcatcaggggagctggtgaggcggtacacaagcacgctgctccccggggacacctgggcccagcagaccttccgggtggaacactggcccaacgagacctcggtccaggccaacggcagcttcgtgcgggcgaccgtacatgactataggctggttctcaaccggaacctctccatctcggagaaccgcaccatgcagctggcggtgctggtcaatgactcagacttccagggcccaggagcgggcgtcctcttgctccacttcaacgtgtcggtgctgccggtcagcctgcacctgcccagtacctactccctctccgtgagcaggagggctcgccgatttgcccagatcgggaaagtctgtgtggaaaactgccaggcattcagtggcatcaacgtccagtacaagctgcattcctctggtgccaactgcagcacgctaggggtggtcacctcagccgaggacacctcggggatcctgtttgtgaatgacaccaaggccctgcggcggcccaagtgtgccgaacttcactacatggtggtggccaccgaccagcagacctctaggcaggcccaggcccagctgcttgtaacagtggaggggtcatatgtggccgaggaggcgggctgccccctgtcctgtgcagtcagcaagagacggctggagtgtgaggagtgtggcggcctgggctccccaacaggcaggtgtgagtggaggcaaggagatggcaaagggatcaccaggaacttctccacctgctctcccagcaccaagacctgccccgacggccactgcgatgttgtggagacccaagacatcaacatttgccctcaggactgcctccggggcagcattgttgggggacacgagcctggggagccccgggggattaaagctggctatggcacctgcaactgcttccctgaggaggagaagtgcttctgcgagcccgaagacatccaggatccactgtgcgacgagctgtgccgcacggtgatcgcagccgctgtcctcttctccttcatcgtctcggtgctgctgtctgccttctgcatccactgctaccacaagtttgcccacaagccacccatctcctcagctgagatgaccttccggaggcccgcccaggccttcccggtcagctactcctcttccggtgcccgccggccctcgctggactccatggagaaccaggtctccgtggatgccttcaagatcctggaggatccaaagtgggaattccctcggaagaacttggttcttggaaaaactctaggagaaggcgaatttggaaaagtggtcaaggcaacggccttccatctgaaaggcagagcagggtacaccacggtggccgtgaagatgctgaaagagaacgcctccccgagtgagcttcgagacctgctgtcagagttcaacgtcctgaagcaggtcaaccacccacatgtcatcaaattgtatggggcctgcagccaggatggcccgctcctcctcatcgtggagtacgccaaatacggctccctgcggggcttcctccgcgagagccgcaaagtggggcctggctacctgggcagtggaggcagccgcaactccagctccctggaccacccggatgagcgggccctcaccatgggcgacctcatctcatttgcctggcagatctcacaggggatgcagtatctggccgagatgaagctcgttcatcgggacttggcagccagaaacatcctggtagctgaggggcggaagatgaagatttcggatttcggcttgtcccgagatgtttatgaagaggattcctacgtgaagaggagccagggtcggattccagttaaatggatggcaattgaatccctttttgatcatatctacaccacgcaaagtgatgtatggtcttttggtgtcctgctgtgggagatcgtgaccctagggggaaacccctatcctgggattcctcctgagcggctcttcaaccttctgaagaccggccaccggatggagaggccagacaactgcagcgaggagatgtaccgcctgatgctgcaatgctggaagcaggagccggacaaaaggccggtgtttgcggacatcagcaaagacctggagaagatgatggttaagaggagagactacttggaccttgcggcgtccactccatctgactccctgatttatgacgacggcctctcagaggaggagacaccgctggtggactgtaataatgcccccctccctcgagccctcccttccacatggattgaaaacaaactctatggtagaatttcccatgcatttactagattctagcaccgctgtcccctctgcactatccttcctctctgtgatgctttttaaaaatgtttctggtctgaacaaaaccaaagtctgctctgaacctttttatttgtaaatgtctgactttgcatccagtttacatttaggcattattgcaactatgtttttctaaaaggaagtgaaaataagtgtaattaccacattgcccagcaacttaggatggtagaggaaaaaacagatcagggcggaactctcaggggagaccaagaacaggttgaataaggcgcttctggggtgggaatcaagtcatagtacttctactttaactaagtggataaatatacaaatctggggaggtattcagttgagaaaggagccaccagcaccactcagcctgcactgggagcacagccaggttcccccagacccctcctgggcaggcaggtgcctctcagaggccacccggcactggcgagcagccactggccaagcctcagccccagtcccagccacatgtcctccatcaggggtagcgaggttgcaggagctggctggccctgggaggacgcacccccactgctgttttcacatcctttcccttacccaccttcaggacggttgtcacttatgaagtcagtgctaaagctggagcagttgctttttgaaagaacatggtctgtggtgctgtggtcttacaatggacagtaaatatggttcttgccaaaactccttcttttgtctttgattaaatactagaaatttaaaaaaaaaaaaaaa

SEQ ID NO: 539 - DNA, 1227 bp, Homo sapiens
gtttccggtgcaggtggggaaaatggcggtgtctacagtgttctcgacttcgtcgctgatgcttgctctgtcaaggcacagcctattgtctcctttgctcagtgtgacatcattcagacgcttctacagaggtgacagcccaacagattcccaaaaggacatgattgaaatccctttgcctccatggcaggagagaactgatgaatccatagaaaccaaaagagcccgcctgctctatgagagcagaaagaggggaatgttggaaaactgcattcttcttagtctttttgctaaagaacatctgcagcacatgacagaaaagcagctgaacctctatgaccgcctgattaacgagcctagtaatgactgggatatttactactgggccacagaagctaaaccagccccagaaatatttgaaaatgaagtcatggccctgctgagagactttgctaaaaacaaaaacaaagagcagagactgcgtgccccagatcttgagtacctctttgaaaagccacgttgagctgtgctccacggcctggcatgggggttcagtctgtggatggtaactacttatgatggacgttagccttgcttccggcttcttagatgcccagctgccctaccccagaccactggtcctgcctcaagtgatggacataaccctctcctaggacatacatgtaaatgcacaatgtgactcattctcatacttttttgttcagctctgagcctcaaaagtgatttgtcagcagcgctggcatgcaggctttgcctggctgctatctctagaggcaagtctgccacgagagggcactgcaggcgaagcagttgtgcttgctcattgcctcagcccaagtgtactcaaagaaaagaggcagccagctgtgcgtgctgtatggaaagcctcccgccctccctgcagctccccgccctcagtggcccagggctttgttgaagtggaactccccacttccaacctggtatggctccttctgcgaagggaagctgatcccagcctcctgagctgaatccttcaaaggcacagcaggcagaatgagggccacaggcaggagtggtgtgggcacactgcttaggagtcaacatcttcatcattgggctttctttaaaacgtgcactttgtaatttgaaagagaattattaaagcatactgaaaaaaggaaatttacaatttcccagccctcacaattaattttaaaaaaaaaa

SEQ ID NO: 540 - DNA, 1161 bp, Homo sapiens
acccgggaaaccggaagccgcctcccacttggttgctcgtacgcggctagtgggtcctcagtggatgtaggctgggcgccgcgatgttcgacgggacaccggcggagagcgacctcggggttaaggggtggggctgacgtcaggagccaagatggcggcggtggtcgccctctccttgaggcgccggttgccggccacaacccttggcggagcctgcctgcaggcctcccgaggagcccagacagctgcagccacagctccccgtatcaagaaatttgccatctatcgatgggacccagacaaggctggagacaaacctcatatgcagacttatgaagttgaccttaataaatgtggccccatggtattggatgctttaatcaagattaagaatgaagttgactctactttgaccttccgaagatcatgcagagaaggcatctgtggctcttgtgcaatgaacatcaatggaggcaacactctagcttgcacccgaaggattgacaccaacctcaataaggtctcaaaaatctaccctcttccacacatgtatgtgataaaggatcttgttcccgatttgagcaacttctatgcacagtacaaatccattgagccttatttgaagaagaaggatgaatctcaggaaggcaagcagcagtatctgcagtccatagaagagcgtgagaaactggacgggctctacgagtgcattctctgtgcctgctgtagcaccagctgccccagctactggtggaacggagacaaatatctggggcctgcagttcttatgcaggcctatcgctggatgattgactccagagatgacttcacagaggagcgcctggccaagctgcaggacccattctctctataccgctgccacaccatcatgaactgcacaaggacctgtcctaagggtctgaatccagggaaagctattgcagagatcaagaaaatgatggcaacctataaggagaagaaagcttcagtttaactgtttccatgctaaacatgatttataaccagctcagagctgaacataatttatatctaatttgagttcctttaaagatcttggttttccatgaatacagcatgtataataaaaattttaagaaataaatgttattctactttattaacaaaaaaaaaaaaaaaaaa

SEQ ID NO: 541 - DNA, 2858 bp, Homo sapiens
gcgtcacttccgtccagaccggaacccaagatggctgcgctgttgctgagacacgttggtcgtcattgcctccgagcccactttagccctcagctctgtatcagaaatgctgttcctttgggaaccacggccaaagaagagatggagcggttctggaataagaatataggttcaaaccgtcctctgtctccccacattactatctacagttggtctcttcccatggcgatgtccatctgccaccgtggcactggtattgctttgagtgcaggggtctctctttttggcatgtcggccctgttactccctgggaactttgagtcttatttggaacttgtgaagtccctgtgtctggggccagcactgatccacacagctaagtttgcacttgtcttccctctcatgtatcatacctggaatgggatccgacacttgatgtgggacctaggaaaaggcctgaagattccccagctataccagtctggagtggttgtcctggttcttactgtgttgtcctctatggggctggcagccatgtgaagaaaggaggctcccagcatcatcttcctacacattattacattcacccatctttctgtttgtcattcttatctccagcctgggaaaagttctccttatttgtttagatccttttgtattttcagatctccttggagcagtagagtacctggtagaccataatagtggaaaagggtctagttttccccttgtttctaaagatgaggtggctgcaaaaactccccttttttgcccacagcttgcctactctcggcctagaagcagttattctctctccatattgggctttgatttgtgctgagggtcagcttttggctccttcttcctgagacagtggaaacaatgccagctctgtggcttctgccctggggatgggccgggttggggggtgggttggtgaggctttgggtgccactgcctgtgggttgctggcttaaaggacaattctcttcattggtgagagcccaggccattaacacctacacagtgttattgaaagaagagaggtgggggtggaggggaattagtctgtcccagctagagggagataaagagggctagttagttcttggagcagctgcttttgaggagaaaatatatagctttggacacgaggaagatctagaaaattatcattgaacatattaatggttatttctttttcttggatttccagaaaagcctcttaattttatgctttctcatcgaagtaatgtaccctttttttctgaaactgaattaaatactcattttatctttgactctccttgaaatctagagaaaccaagaaaatggctgttgggaaggaaccaatttcctcctcttccctcgggtctcaggcatttacatcctccctctccccgcaatctgacctttaccaggagggaaacagttctcctacatctcatcattggaaaagttttcagggaatcagatagaacttagccagagatttaaatatcacagaaaagcctcagagaaggaaggagaaaaagaaaagaagtgacgcatgtagagtgcttttgggttataggcaccaaaatcccattaaggactgattataagcttcatggtacagttcagcaaattatgattcattgaggggcacagaggaccagtgttggtgacagctaggggatgatgacctgaggttataggcttggggtgaatgaagcatagagtttttttttaaaaaagaagggattgttgaaaacctggcaaaaatgtataatttaatgagaaaacttgctgcttttaaaatccatataggccaggctttagcaggcatgctgttttgatagtttttgggaactctggaataagagacttatctcatctgtcacttcgagttgttggccagccagttaaagctgtgggtcgaagaggggaaatgttaactggctggtgtcaattggataggaagaccttagttaaggtggggacccgctgttttaacagtcttcattcagggtcccaaatagtatttggctttaagtaatgattggttttccctttttactagaggggccctgggaagtccttgtacctttcctccattttaaaccagctgttctctactttgtccttggaatgagggacaagtgatcatgacagaacactttgtcattgggactgggaaaggtttggcaagggcattaaatttaacagccagtgccaggaaaatataaaatggggtcaatgataaacagctgttagaggctggaaaatgggtagggcagttgaattttttggtggtttcgtaccatttgggtgattgaagcatggtagtgggtgggtggggggtgtgacagagcatcatgtttgttattctgccttaaatttctacttactgtctttttcttctctgtcttccaatcactttaatatcttcaattttcaaactatatttgtacttgggcttagatagaaagtcttacacaagcatagtatcttctactttggttttccctaccttttcttccccaccttctccaaacacacatatacatactctactcaattctatttctgattttgtagttgttagttgtccatgctcaggataaaaaatgagtgggtagggttgagggactggttctttgaggttctgccctttttccatgattcagaccaactttctcttggtcatttctggagtataactgactcaattcttgtaaaaatgtgttccacccaaaccactgtatgttcttttccctactttattttctcctaccttccttctcctaattgtgttacaagaggcagccatagcaagaatggaaaatccagatcagtaaaagattcaacaaaaaaaa

SEQ ID NO: 542 - DNA, 2694 bp, Homo sapiens
gcgtcacttccgtccagaccggaacccaagatggctgcgctgttgctgagacacgttggtcgtcattgcctccgagcccactttagccctcagctctgtatcagaaatgctgttcctttgggaaccacggccaaagaagagatggagcggttctggaataagaatataggttcaaaccgtcctctgtctccccacattactatctacagttggtctcttcccatggcgatgtccatctgccaccgtggcactggtattgctttgagtgcagatgtgggacctaggaaaaggcctgaagattccccagctataccagtctggagtggttgtcctggttcttactgtgttgtcctctatggggctggcagccatgtgaagaaaggaggctcccagcatcatcttcctacacattattacattcacccatctttctgtttgtcattcttatctccagcctgggaaaagttctccttatttgtttagatccttttgtattttcagatctccttggagcagtagagtacctggtagaccataatagtggaaaagggtctagttttccccttgtttctaaagatgaggtggctgcaaaaactccccttttttgcccacagcttgcctactctcggcctagaagcagttattctctctccatattgggctttgatttgtgctgagggtcagcttttggctccttcttcctgagacagtggaaacaatgccagctctgtggcttctgccctggggatgggccgggttggggggtgggttggtgaggctttgggtgccactgcctgtgggttgctggcttaaaggacaattctcttcattggtgagagcccaggccattaacacctacacagtgttattgaaagaagagaggtgggggtggaggggaattagtctgtcccagctagagggagataaagagggctagttagttcttggagcagctgcttttgaggagaaaatatatagctttggacacgaggaagatctagaaaattatcattgaacatattaatggttatttctttttcttggatttccagaaaagcctcttaattttatgctttctcatcgaagtaatgtaccctttttttctgaaactgaattaaatactcattttatctttgactctccttgaaatctagagaaaccaagaaaatggctgttgggaaggaaccaatttcctcctcttccctcgggtctcaggcatttacatcctccctctccccgcaatctgacctttaccaggagggaaacagttctcctacatctcatcattggaaaagttttcagggaatcagatagaacttagccagagatttaaatatcacagaaaagcctcagagaaggaaggagaaaaagaaaagaagtgacgcatgtagagtgcttttgggttataggcaccaaaatcccattaaggactgattataagcttcatggtacagttcagcaaattatgattcattgaggggcacagaggaccagtgttggtgacagctaggggatgatgacctgaggttataggcttggggtgaatgaagcatagagtttttttttaaaaaagaagggattgttgaaaacctggcaaaaatgtataatttaatgagaaaacttgctgcttttaaaatccatataggccaggctttagcaggcatgctgttttgatagtttttgggaactctggaataagagacttatctcatctgtcacttcgagttgttggccagccagttaaagctgtgggtcgaagaggggaaatgttaactggctggtgtcaattggataggaagaccttagttaaggtggggacccgctgttttaacagtcttcattcagggtcccaaatagtatttggctttaagtaatgattggttttccctttttactagaggggccctgggaagtccttgtacctttcctccattttaaaccagctgttctctactttgtccttggaatgagggacaagtgatcatgacagaacactttgtcattgggactgggaaaggtttggcaagggcattaaatttaacagccagtgccaggaaaatataaaatggggtcaatgataaacagctgttagaggctggaaaatgggtagggcagttgaattttttggtggtttcgtaccatttgggtgattgaagcatggtagtgggtgggtggggggtgtgacagagcatcatgtttgttattctgccttaaatttctacttactgtctttttcttctctgtcttccaatcactttaatatcttcaattttcaaactatatttgtacttgggcttagatagaaagtcttacacaagcatagtatcttctactttggttttccctaccttttcttccccaccttctccaaacacacatatacatactctactcaattctatttctgattttgtagttgttagttgtccatgctcaggataaaaaatgagtgggtagggttgagggactggttctttgaggttctgccctttttccatgattcagaccaactttctcttggtcatttctggagtataactgactcaattcttgtaaaaatgtgttccacccaaaccactgtatgttcttttccctactttattttctcctaccttccttctcctaattgtgttacaagaggcagccatagcaagaatggaaaatccagatcagtaaaagattcaacaaaaaaaa

SEQ ID NO: 543 - DNA, 2756 bp, Homo sapiens
gcgtcacttccgtccagaccggaacccaagatggctgcgctgttgctgagacacgttggtcgtcattgcctccgagcccactttagccctcagctctgtatcagaaattggtctcttcccatggcgatgtccatctgccaccgtggcactggtattgctttgagtgcaggggtctctctttttggcatgtcggccctgttactccctgggaactttgagtcttatttggaacttgtgaagtccctgtgtctggggccagcactgatccacacagctaagtttgcacttgtcttccctctcatgtatcatacctggaatgggatccgacacttgatgtgggacctaggaaaaggcctgaagattccccagctataccagtctggagtggttgtcctggttcttactgtgttgtcctctatggggctggcagccatgtgaagaaaggaggctcccagcatcatcttcctacacattattacattcacccatctttctgtttgtcattcttatctccagcctgggaaaagttctccttatttgtttagatccttttgtattttcagatctccttggagcagtagagtacctggtagaccataatagtggaaaagggtctagttttccccttgtttctaaagatgaggtggctgcaaaaactccccttttttgcccacagcttgcctactctcggcctagaagcagttattctctctccatattgggctttgatttgtgctgagggtcagcttttggctccttcttcctgagacagtggaaacaatgccagctctgtggcttctgccctggggatgggccgggttggggggtgggttggtgaggctttgggtgccactgcctgtgggttgctggcttaaaggacaattctcttcattggtgagagcccaggccattaacacctacacagtgttattgaaagaagagaggtgggggtggaggggaattagtctgtcccagctagagggagataaagagggctagttagttcttggagcagctgcttttgaggagaaaatatatagctttggacacgaggaagatctagaaaattatcattgaacatattaatggttatttctttttcttggatttccagaaaagcctcttaattttatgctttctcatcgaagtaatgtaccctttttttctgaaactgaattaaatactcattttatctttgactctccttgaaatctagagaaaccaagaaaatggctgttgggaaggaaccaatttcctcctcttccctcgggtctcaggcatttacatcctccctctccccgcaatctgacctttaccaggagggaaacagttctcctacatctcatcattggaaaagttttcagggaatcagatagaacttagccagagatttaaatatcacagaaaagcctcagagaaggaaggagaaaaagaaaagaagtgacgcatgtagagtgcttttgggttataggcaccaaaatcccattaaggactgattataagcttcatggtacagttcagcaaattatgattcattgaggggcacagaggaccagtgttggtgacagctaggggatgatgacctgaggttataggcttggggtgaatgaagcatagagtttttttttaaaaaagaagggattgttgaaaacctggcaaaaatgtataatttaatgagaaaacttgctgcttttaaaatccatataggccaggctttagcaggcatgctgttttgatagtttttgggaactctggaataagagacttatctcatctgtcacttcgagttgttggccagccagttaaagctgtgggtcgaagaggggaaatgttaactggctggtgtcaattggataggaagaccttagttaaggtggggacccgctgttttaacagtcttcattcagggtcccaaatagtatttggctttaagtaatgattggttttccctttttactagaggggccctgggaagtccttgtacctttcctccattttaaaccagctgttctctactttgtccttggaatgagggacaagtgatcatgacagaacactttgtcattgggactgggaaaggtttggcaagggcattaaatttaacagccagtgccaggaaaatataaaatggggtcaatgataaacagctgttagaggctggaaaatgggtagggcagttgaattttttggtggtttcgtaccatttgggtgattgaagcatggtagtgggtgggtggggggtgtgacagagcatcatgtttgttattctgccttaaatttctacttactgtctttttcttctctgtcttccaatcactttaatatcttcaattttcaaactatatttgtacttgggcttagatagaaagtcttacacaagcatagtatcttctactttggttttccctaccttttcttccccaccttctccaaacacacatatacatactctactcaattctatttctgattttgtagttgttagttgtccatgctcaggataaaaaatgagtgggtagggttgagggactggttctttgaggttctgccctttttccatgattcagaccaactttctcttggtcatttctggagtataactgactcaattcttgtaaaaatgtgttccacccaaaccactgtatgttcttttccctactttattttctcctaccttccttctcctaattgtgttacaagaggcagccatagcaagaatggaaaatccagatcagtaaaagattcaacaaaaaaaa

SEQ ID NO: 544 - DNA, 2699 bp, Homo sapiens
gcgtcacttccgtccagaccggaacccaagatggctgcgctgttgctgagttggtctcttcccatggcgatgtccatctgccaccgtggcactggtattgctttgagtgcaggggtctctctttttggcatgtcggccctgttactccctgggaactttgagtcttatttggaacttgtgaagtccctgtgtctggggccagcactgatccacacagctaagtttgcacttgtcttccctctcatgtatcatacctggaatgggatccgacacttgatgtgggacctaggaaaaggcctgaagattccccagctataccagtctggagtggttgtcctggttcttactgtgttgtcctctatggggctggcagccatgtgaagaaaggaggctcccagcatcatcttcctacacattattacattcacccatctttctgtttgtcattcttatctccagcctgggaaaagttctccttatttgtttagatccttttgtattttcagatctccttggagcagtagagtacctggtagaccataatagtggaaaagggtctagttttccccttgtttctaaagatgaggtggctgcaaaaactccccttttttgcccacagcttgcctactctcggcctagaagcagttattctctctccatattgggctttgatttgtgctgagggtcagcttttggctccttcttcctgagacagtggaaacaatgccagctctgtggcttctgccctggggatgggccgggttggggggtgggttggtgaggctttgggtgccactgcctgtgggttgctggcttaaaggacaattctcttcattggtgagagcccaggccattaacacctacacagtgttattgaaagaagagaggtgggggtggaggggaattagtctgtcccagctagagggagataaagagggctagttagttcttggagcagctgcttttgaggagaaaatatatagctttggacacgaggaagatctagaaaattatcattgaacatattaatggttatttctttttcttggatttccagaaaagcctcttaattttatgctttctcatcgaagtaatgtaccctttttttctgaaactgaattaaatactcattttatctttgactctccttgaaatctagagaaaccaagaaaatggctgttgggaaggaaccaatttcctcctcttccctcgggtctcaggcatttacatcctccctctccccgcaatctgacctttaccaggagggaaacagttctcctacatctcatcattggaaaagttttcagggaatcagatagaacttagccagagatttaaatatcacagaaaagcctcagagaaggaaggagaaaaagaaaagaagtgacgcatgtagagtgcttttgggttataggcaccaaaatcccattaaggactgattataagcttcatggtacagttcagcaaattatgattcattgaggggcacagaggaccagtgttggtgacagctaggggatgatgacctgaggttataggcttggggtgaatgaagcatagagtttttttttaaaaaagaagggattgttgaaaacctggcaaaaatgtataatttaatgagaaaacttgctgcttttaaaatccatataggccaggctttagcaggcatgctgttttgatagtttttgggaactctggaataagagacttatctcatctgtcacttcgagttgttggccagccagttaaagctgtgggtcgaagaggggaaatgttaactggctggtgtcaattggataggaagaccttagttaaggtggggacccgctgttttaacagtcttcattcagggtcccaaatagtatttggctttaagtaatgattggttttccctttttactagaggggccctgggaagtccttgtacctttcctccattttaaaccagctgttctctactttgtccttggaatgagggacaagtgatcatgacagaacactttgtcattgggactgggaaaggtttggcaagggcattaaatttaacagccagtgccaggaaaatataaaatggggtcaatgataaacagctgttagaggctggaaaatgggtagggcagttgaattttttggtggtttcgtaccatttgggtgattgaagcatggtagtgggtgggtggggggtgtgacagagcatcatgtttgttattctgccttaaatttctacttactgtctttttcttctctgtcttccaatcactttaatatcttcaattttcaaactatatttgtacttgggcttagatagaaagtcttacacaagcatagtatcttctactttggttttccctaccttttcttccccaccttctccaaacacacatatacatactctactcaattctatttctgattttgtagttgttagttgtccatgctcaggataaaaaatgagtgggtagggttgagggactggttctttgaggttctgccctttttccatgattcagaccaactttctcttggtcatttctggagtataactgactcaattcttgtaaaaatgtgttccacccaaaccactgtatgttcttttccctactttattttctcctaccttccttctcctaattgtgttacaagaggcagccatagcaagaatggaaaatccagatcagtaaaagattcaacaaaaaaaa

SEQ ID NO: 545 - DNA, 1382 bp, Homo sapiens
gtgggaattgtcgcctaagtggttccgggttggtggatgaccttgagccctcaggaacgagatggcggttctctggaggctgagtgccgtttgcggtgccctaggaggccgagctctgttgcttcgaactccagtggtcagacctgctcatatctcagcatttcttcaggaccgacctatcccagaatggtgtggagtgcagcacatacacttgtcaccgagccaccattctggctccaaggctgcatctctccactggactagcgagagggttgtcagtgttttgctcctgggtctgcttccggctgcttatttgaatccttgctctgcgatggactattccctggctgcagccctcactcttcatggtcactggggccttggacaagttgttactgactatgttcatggggatgccttgcagaaagctgccaaggcagggcttttggcactttcagctttaacctttgctgggctttgctatttcaactatcacgatgtgggcatctgcaaagctgttgccatgctgtggaagctctgacctttttgacttcatactttgaagaattgatgtatgcctctttgcctctgctttgtcatgccattaagctcacaataaggaagaaataacagataagtccattggtggacagccttcttctcttaatcacaagattattttcagaatttaatctttgaggaaaaggtttgagaggaattatatctaagttgtgagactgagttctatattctggtgagttaatggggttgcctcccagcttcttataagactcacagtataactaaacatgatatatcagcttttgcctttcaatttatcaatctcttaaagagaatccaactttattacgattagtatatgatcaaacttccatatttgccttgggaataatggacaaagggaaatactcttaattcatgaataaaaactttgcagaaaattagacagtgtttaattttcgaaaacttccctctctagacagtagataccacctactgatggttacatatactagggaaattttaaaattaggaaatgctgatagctcatattataaatttctaaatcctaggaagaaacgcttggagtgcttctgaatatacagaagttccatttaagggcaagtttccctgtagatgtatcaaaatactaccaactgtaaattgagatttaattcccaaatgtattctacttgttctaaaacaatctgtccacaaatataaaactataagtaataaattgttattttcgcacaatgggaatctctaatgtgaaaatgtattctatgaaaataatttttttaaataaaatgttatataataaaagtgtcttctatgcttttaaaaaaaaaaaaaaaaaa

SEQ ID NO: 546 - DNA, 8770 bp, Homo sapiens
atgctcagtggcttctcgacaagttggcagcaacaacacggccctggtcgtcgtcgccgctgcggtaacggagcggtttgggtggcggagcctgcgttcgcgccttcccgctctcctcgggaggcccttcctgctctcccctaggctccgcggccgcccagggggtgggagcgggtgaggggagccaggcgcccagcgagagaggccccccgccgcagggcggcccgggagctcgaggcggtccggcccgcgcgggcagcggcgcggcgctgaggaggggcggcctggccgggacgcctcggggcgggggccgaggagctctccgggccgccggggaaagctacgggcccggtgcgtccgcggaccagcagcgcgggagagcggactcccctcgccaccgcccgagcccaggttatcctgaatacatgtctaacaattttccttgcaacgttagctgttgtttttcactgtttccaaaggatcaaaattgcttcagaaattggagacatatttgatttaaaaggaaaaacttgaacaaatggacaatatgtctattacgaatacaccaacaagtaatgatgcctgtctgagcattgtgcatagtttgatgtgccatagacaaggtggagagagtgaaacatttgcaaaaagagcaattgaaagtttggtaaagaagctgaaggagaaaaaagatgaattggattctttaataacagctataactacaaatggagctcatcctagtaaatgtgttaccatacagagaacattggatgggaggcttcaggtggctggtcggaaaggatttcctcatgtgatctatgcccgtctctggaggtggcctgatcttcacaaaaatgaactaaaacatgttaaatattgtcagtatgcgtttgacttaaaatgtgatagtgtctgtgtgaatccatatcactacgaacgagttgtatcacctggaattgatctctcaggattaacactgcagagtaatgctccatcaagtatgatggtgaaggatgaatatgtgcatgactttgagggacagccatcgttgtccactgaaggacattcaattcaaaccatccagcatccaccaagtaatcgtgcatcgacagagacatacagcaccccagctctgttagccccatctgagtctaatgctaccagcactgccaactttcccaacattcctgtggcttccacaagtcagcctgccagtatactggggggcagccatagtgaaggactgttgcagatagcatcagggcctcagccaggacagcagcagaatggatttactggtcagccagctacttaccatcataacagcactaccacctggactggaagtaggactgcaccatacacacctaatttgcctcaccaccaaaacggccatcttcagcaccacccgcctatgccgccccatcccggacattactggcctgttcacaatgagcttgcattccagcctcccatttccaatcatcctgctcctgagtattggtgttccattgcttactttgaaatggatgttcaggtaggagagacatttaaggttccttcaagctgccctattgttactgttgatggatacgtggacccttctggaggagatcgcttttgtttgggtcaactctccaatgtccacaggacagaagccattgagagagcaaggttgcacataggcaaaggtgtgcagttggaatgtaaaggtgaaggtgatgtttgggtcaggtgccttagtgaccacgcggtctttgtacagagttactacttagacagagaagctgggcgtgcacctggagatgctgttcataagatctacccaagtgcatatataaaggtctttgatttgcgtcagtgtcatcgacagatgcagcagcaggcggctactgcacaagctgcagcagctgcccaggcagcagccgtggcaggaaacatccctggcccaggatcagtaggtggaatagctccagctatcagtctgtcagctgctgctggaattggtgttgatgaccttcgtcgcttatgcatactcaggatgagttttgtgaaaggctggggaccggattacccaagacagagcatcaaagaaacaccttgctggattgaaattcacttacaccgggccctccagctcctagacgaagtacttcataccatgccgattgcagacccacaacctttagactgaggtcttttaccgttggggcccttaaccttatcaggatggtggactacaaaatacaatcctgtttataatctgaagatatatttcacttttgttctgctttatcttttcataaagggttgaaaatgtgtttgctgccttgctcctagcagacagaaactggattaaaacaattttttttttcctcttcagaacttgtcaggcatggctcagagcttgaagattaggagaaacacattcttattaattcttcacctgttatgtatgaaggaatcattccagtgctagaaaatttagccctttaaaacgtcttagagccttttatctgcagaacatcgatatgtatatcattctacagaataatccagtattgctgattttaaaggcagagaagttctcaaagttaattcacctatgttattttgtgtacaagttgttattgttgaacatacttcaaaaataatgtgccatgtgggtgagttaattttaccaagagtaactttactctgtgtttaaaaagtaagttaataatgtattgtaatctttcatccaaaatattttttgcaagttatattagtgaagatggtttcaattcagattgtcttgcaacttcagttttatttttgccaaggcaaaaaactcttaatctgtgtgtatattgagaatcccttaaaattaccagacaaaaaaatttaaaattacgtttgttattcctagtggatgactgttgatgaagtatacttttcccctgttaaacagtagttgtattcttctgtatttctaggcacaaggttggttgctaagaagcctataagaggaatttcttttccttcattcatagggaaaggttttgtattttttaaaacactaaaagcagcgtcactctacctaatgtctcactgttctgcaaaggtggcaatgcttaaactaaataatgaataaactgaatattttggaaactgctaaattctatgttaaatactgtgcagaataatggaaacattacagttcataataggtagtttggatatttttgtacttgatttgatgtgactttttttggtataatgtttaaatcatgtatgttatgatattgtttaaaattcagtttttgtatcttggggcaagactgcaaacttttttatatcttttggttattctaagccctttgccatcaatgatcatatcaattggcagtgactttgtatagagaatttaagtagaaaagttgcagatgtattgactgtaccacagacacaatatgtatgctttttacctagctggtagcataaataaaactgaatctcaacatacaaagttgaattctaggtttgatttttaagattttttttttcttttgcacttttgagtccaatctcagtgatgaggtaccttctactaaatgacaggcaacagccagttctattgggcagctttgtttttttccctcacactctaccgggacttccccatggacattgtgtatcatgtgtagagttggttttttttttttttaatttttattttactatagcagaaatagacctgattatctacaagatgataaatagattgtctacaggataaatagtatgaaataaaatcaaggattatctttcagatgtgtttacttttgcctggagaacttttagctatagaaacacttgtgtgatgatagtcctccttatatcacctggaatgaacacagcttctactgccttgctcagaaggtcttttaaatagaccatcctagaaaccactgagtttgcttatttctgtgatttaaacatagatcttgatccaagctacatgacttttgtctttaaataacttatctaccacctcatttgtactcttgattacttacaaattctttcagtaaacacctaattttcttctgtaaaagtttggtgatttaagttttattggcagttttataaaaagacatcttctctagaaattgctaactttaggtccattttactgtgaatgaggaataggagtgagttttagaataacagatttttaaaaatccagatgatttgattaaaaccttaatcatacattgacataattcattgcttcttttttttgagatatggagtcttgctgtgttgcccaggcaggagtgcagtggtatgatctcagctcactgcaacctctgcctcccgggttcaactgattctcctgcctcagcctccctggtagctaggattacaggtgcccgccaccatgcctggctaacttttgtagttttagtagagacggggttttgcctgttggccaggctggtcttgaactcctgacctcaagtgatccatccaccttggcctcccaaagtgctgggattacgggcgtgagccactgtccctggcctcattgttcccttttctactttaaggaaagttttcatgtttaatcatctggggaaagtatgtgaaaaatatttgttaagaagtatctctttggagccaagccacctgtcttggtttctttctactaagagccataaagtatagaaatacttctagttgttaagtgcttatatttgtacctagatttagtcacacgcttttgagaaaacatctagtatgttatgatcagctattcctgagagcttggttgttaatctatatttctatttcttagtggtagtcatctttgatgaataagactaaagattctcacaggtttaaaattttatgtctactttaagggtaaaattatgaggttatggttctgggtgggttttctctagctaattcatatctcaaagagtctcaaaatgttgaatttcagtgcaagctgaatgagagatgagccatgtacacccaccgtaagacctcattccatgtttgtccagtgcctttcagtgcattatcaaagggaatccttcatggtgttgcctttattttccggggagtagatcgtgggatatagtctatctcatttttaatagtttaccgcccctggtatacaaagataatgacaataaatcactgccatataaccttgctttttccagaaacatggctgttttgtattgctgtaaccactaaataggttgcctataccattcctcctgtgaacagtgcagatttacaggttgcatggtctggcttaaggagagccatacttgagacatgtgagtaaactgaactcatattagctgtgctgcatttcagacttaaaatccatttttgtggggcagggtgtggtgtgtaaaggggggtgtttgtaatacaagttgaaggcaaaataaaatgtcctgtctcccagatgatatacatcttattatttttaaagtttattgctaattgtaggaaggtgagttgcaggtatctttgactatggtcatctggggaaggaaaattttacattttactattaatgctccttaagtgtctatggaggttaaagaataaaatggtaaatgtttctgtgcctggtttgatggtaactggttaatagttactcaccattttatgcagagtcacattagttcacaccctttctgagagccttttgggagaagcagttttattctctgagtggaacagagttctttttgttgataatttctagtttgctcccttcgttattgccaactttactggcattttatttaatgatagcagattgggaaaatggcaaatttaggttacggaggtaaatgagtatatgaaagcaattacctctaaagccagttaacaattattttgtaggtggggtacactcagcttaaagtaatgcatttttttttcccgtaaaggcagaatccatcttgttgcagatagctatctaaataatctcatatcctcttttgcaaagactacagagaataggctatgacaatcttgttcaagcctttccatttttttccctgataactaagtaatttctttgaacataccaagaagtatgtaaaaagtccatggccttattcatccacaaagtggcatcctaggcccagccttatccctagcagttgtcccagtgctgctaggttgcttatcttgtttatctggaatcactgtggagtgaaattttccacatcatccagaattgccttatttaagaagtaaaacgttttaatttttagcctttttttggtggagttatttaatatgtatatcagaggatatactagatggtaacatttctttctgtgcttggctatctttgtggacttcaggggcttctaaaacagacaggactgtgttgcctttactaaatggtctgagacagctatggttttgaatttttagttttttttttttaacccacttcccctcctggtctcttccctctctgataattaccattcatatgtgagtgttagtgtgcctccttttagcattttcttcttctctttctgattcttcatttctgactgcctaggcaaggaaaccagataaccaaacttactagaacgttctttaaaacacaagtacaaactctgggacaggacccaagacactttcctgtgaagtgctgaaaaagacctcattgtattggcatttgatatcagtttgatgtagcttagagtgcttcctgattcttgctgagtttcaggtagttgagatagagagaagtgagtcatattcatattttcccccttagaataatattttgaaaggtttcattgcttccacttgaatgctgctcttacaaaaactggggttacaagggttactaaattagcatcagtagccagaggcaataccgttgtctggaggacaccagcaaacaacacacaacaaagcaaaacaaaccttgggaaactaaggccatttgttttgttttggtgtcccctttgaagccctgccttctggccttactcctgtacagatatttttgacctataggtgcctttatgagaattgagggtctgacatcctgccccaaggagtagctaaagtaattgctagtgttttcagggattttaacatcagactggaatgaatgaatgaaactttttgtcctttttttttctgtttttttttttctaatgtagtaaggactaaggaaaacctttggtgaagacaatcatttctctctgttgatgtggatacttttcacaccgtttatttaaatgctttctcaataggtccagagccagtgttcttgttcaacctgaaagtaatggctctgggttgggccagacagttgcactctctagtttgccctctgccacaaatttgatgtgtgacctttgggcaagtcatttatcttctctgggccttagttgcctcatctgtaaaatgagggagttggagtagattaattattccagctctgaaattctaagtgaccttggctaccttgcagcagttttggatttcttccttatctttgttctgctgtttgagggggctttttacttatttccatgttattcaaaggagactaggcttgatattttattactgttcttttatggacaaaaggttacatagtatgcccttaagacttaattttaaccaaaggcctagcaccaccttaggggctgcaataaacacttaacgcgcgtgcgcacgcgcgcgcgcacacacacacacacacacacacacacacacaggtcagagtttaaggctttcgagtcatgacattctagcttttgaattgcgtgcacacacacacgcacgcacacactctggtcagagtttattaaggctttcgagtcatgacattatagcttttgagttggtgtgtgtgacaccaccctcctaagtggtgtgtgcttgtaattttttttttcagtgaaaatggattgaaaacctgttgttaatgcttagtgatattatgctcaaaacaaggaaattcccttgaaccgtgtcaattaaactggtttatatgactcaagaaaacaataccagtagatgattattaactttattcttggctctttttaggtccattttgattaagtgacttttggctggatcattcagagctctcttctagcctacccttggatgagtacaattaatgaaattcatattttcaaggacctgggagccttccttggggctgggttgagggtggggggttggggagtcctggtagaggccagctttgtggtagctggagaggaagggatgaaaccagctgctgttgcaaaggctgcttgtcattgatagaaggactcacgggcttggattgattaagactaaacatggagttggcaaactttcttcaagtattgagttctgttcaatgcattggacatgtgatttaagggaaaagtgtgaatgcttatagatgatgaaaacctggtgggctgcagagcccagtttagaagaagtgagttgggggttggggacagatttggtggtggtatttcccaactgtttcctcccctaaattcagaggaatgcagctatgccagaagccagagaagagccactcgtagcttctgctttggggacaactggtcagttgaaagtcccaggagttcctttgtggctttctgtatacttttgcctggttaaagtctgtggctaaaaaatagtcgaacctttcttgagaactctgtaacaaagtatgtttttgattaaaagagaaagccaacta

SEQ ID NO: 547 - DNA, 1500 bp, Homo sapiens
agaacaccagtttggagctttaggggctttctggtcaaagagggaatggcccaggcggtgatgtggaggatagaatgaagcactgagtatgagtggcgaaggcgtacggtgggtgtagagattttctgggcgacgtgacctaagaaatgactttagaactggctaatcattggttttggagggactaaaagtagttcctggttggtgaaaataaatcattaatgcgttttaaatgaaaaagaaatgcatgcgtcttgtaaaaaatgtgaaataaaagaggcataaagtcaaaagcagagcctatgccttcccccaccaaacaaacaggtaacctagttaacaggtgtgtcgtaggattcgaagttcgcctccagctccgagagtgcgcctacatctcttccaacaaaatccactcacacttgcaacgcctggcaaggctcttcaatatgtgattccttgactgtcctgtgcgtctctcgagtgtaaacacctctggggctcgtgattcggggctgccagaaagagaaggaaggtgccgccagcgtctgtttcttcccgaagtgaactcctacaacctagccaccttctccccagagctgtcgactggctgttgaaggccaatttttgtgcctacgcaggtcctcaacacagaacaaaacaaaaaaacaacaaaggccgggctaatagctatttataaacacttactggacgcccactctacgccgagctctcccgcgctccttggatacttttttgcaacgagatgccaatttccccggcgaccactccctcaaacaggccttcgcctccgcccgcgctgaggcccaggcccaggtccagattcagagccgcccgccggctggcgctgccctgtaggcgcctgcgcagagcgaccctccccgtcactcggagcgggaggcgggggcagccgggagaaaggaaagctgcgggggaaaagggccaaaccctgaaattacccggatgtggtccccgcgcgcgcatgctcagtggcttctcgacaagttggcagcaacaacacggccctggtcgtcgtcgccgctgcggtaacggagcggtttgggtggcggagcctgcgttcgcgccttcccgctctcctcgggaggcccttcctgctctcccctaggctccgcggccgcccagggggtgggagcgggtgaggggagccaggcgcccagcgagagaggccccccgccgcagggcggcccgggagctcgaggcggtccggcccgcgcgggcagcggcgcggcgctgaggaggggcggcctggccgggacgcctcggggcgggggccgaggagctctccgggccgccggggaaagctacgggcccggtgcgtccgcggaccagcagcgcgggagagcggactcccctcgccaccgcccgagcccaggtaaccgcgccatgtcccctccccttcccccggccgggcccgcgcaccccgcctgtggcttccccgccccggggcgggctcccgacgac

SEQ ID NO: 548 - DNA, 1411 bp, Homo sapiens
cgtgattcggggctgccagaaagagaaggaaggtgccgccagcgtctgtttcttcccgaagtgaactcctacaacctagccaccttctccccagagctgtcgactggctgttgaaggccaatttttgtgcctacgcaggtcctcaacacagaacaaaacaaaaaaacaacaaaggccgggctaatagctatttataaacacttactggacgcccactctacgccgagctctcccgcgctccttggatacttttttgcaacgagatgccaatttccccggcgaccactccctcaaacaggccttcgcctccgcccgcgctgaggcccaggcccaggtccagattcagagccgcccgccggctggcgctgccctgtaggcgcctgcgcagagcgaccctccccgtcactcggagcgggaggcgggggcagccgggagaaaggaaagctgcgggggaaaagggccaaaccctgaaattacccggatgtggtccccgcgcgcgcatgctcagtggcttctcgacaagttggcagcaacaacacggccctggtcgtcgtcgccgctgcggtaacggagcggtttgggtggcggagcctgcgttcgcgccttcccgctctcctcgggaggcccttcctgctctcccctaggctccgcggccgcccagggggtgggagcgggtgaggggagccaggcgcccagcgagagaggccccccgccgcagggcggcccgggagctcgaggcggtccggcccgcgcgggcagcggcgcggcgctgaggaggggcggcctggccgggacgcctcggggcgggggccgaggagctctccgggccgccggggaaagctacgggcccggtgcgtccgcggaccagcagcgcgggagagcggactcccctcgccaccgcccgagcccaggtaaccgcgccatgtcccctccccttcccccggccgggcccgcgcaccccgcctgtggcttccccgccccggggcgggctcccgacgacggcggcggcggcggcggcggctgggagcgcgcggaatcctctgggagggcgaccgcggcggcctgacgagccgggccgggcgggccggctgaatgccgggcggcggtgcctcgcgtccctcgggcccccagctccgcttgcagctcgtgggagaatcaagttaaactcggacgggactcctgccgcggccgccgctcctctttgttgttctcagtagtttcacggtcgccccggctgagcgcgttgggtcggctggaatgtgttgccttagggtctaagtgaaagttgtaaattgtttgtctaaatttattttctccagccaatttctgttttgtctttgtcccctactttctcttcctagtcttgtcatgccagtttacgcttctggctttgatatgtttactttttgag

SEQ ID NO: 549 - DNA, 1376 bp, Homo sapiens
ttcatttctaaattggggtttttttttttttttaattggtctcttttaacaaaggtgagtgttaactgctaggtagaatttcataccaggcgatggtaaatttttcataaatattagtaatagacttttaggtttaactagtgctgatcctcataagtaatcctttaaaaaagtgctggtaagattttcctttagggtgactagtaaagtcagtaagacttgattgagcatgccactatcataatgagaagacctaactttaatatttttggaatgtcaaaaacagtgacattttaattaagtaattttatttttaaaaattatttttaatggctaatattttgtaagaattttaagtaattttcaactctgagcatcaaattttaattatgtgcattgaatctctgacttaaccagagcaatttcatcttttcccaagtagtcagatctacttcgtaaaatgtgttctgatgtgtgtcttttttttttttcttttttaggttatcctgaatacatgtctaacaattttccttgcaacgttagctgttgtttttcactgtttccaaaggatcaaaattgcttcagaaattggagacatatttgatttaaaaggaaaaacttgaacaaatggacaatatgtctattacgaatacaccaacaagtaatgatgcctgtctgagcattgtgcatagtttgatgtgccatagacaaggtggagagagtgaaacatttgcaaaaagagcaattgaaagtttggtaaagaagctgaaggagaaaaaagatgaattggattctttaataacagctataactacaaatggagctcatcctagtaaatgtgttaccatacagagaacattggatgggaggcttcaggttagtcttataagagtttttctataccctctatggtggcagatttaaaaacttgctacgtttcctttcaagctactacagggtaatttaatttgtgctccatctcttcagatactgtgcatcctgtacaaatatgcattatgggaatttctggaagaatatgcaaaagataaaatcttaaagttttttaatgttctactcagaaaaatgttcaatggagaaaatttggaaaataaaaataaaaagcagaaaacccacacttcgcaagaactacctttagcactttggtattcatttttgtagcctgttgttttcttttttttttttttcctagacggagtcttgctctgtcacccaggctggagtacagtggcgtgatcttggcccactgcaacctccacctcttgggttcaagcaatcctcctgcctcagcctcctaagtagctgggactacaggcaagtgcaaccatgcctggctaatttttgtatttttagtagag

SEQ ID NO: 550 - DNA, 1175 bp, Homo sapiens
tcttacttttgcccaagctggagtgcagtggtgcaaaacatggctcactgcagccttgacctactgggcttatgcagttctcctgccttagcctcctgagtagctaggactacaggcacataccaccatgcctgggtaattttttattatttgtggagacaagggtcttgccatgttgtccaggctggtcttgaactcctgggctcaagcgatcctcctgccttggcctcccaaagtgataggattacaggtgtgagccaccatgcccagtcactttttacatttttaaaacctgagcacaggccttgaaattataccaaggtttaaattctaggtctgatgtatgacatggccaagttagttattgtgaattttagttttcttatttatgaaatggggattgtaatactgagttggtaggattgtgaggattaaatcagaatatataaaagtgtcttgcataatgtgacacatgaataaatggtcgtttatttttctaggtggctggtcggaaaggatttcctcatgtgatctatgcccgtctctggaggtggcctgatcttcacaaaaatgaactaaaacatgttaaatattgtcagtatgcgtttgacttaaaatgtgatagtgtctgtgtgaatccatatcactacgaacgagttgtatcacctggaattggtaagtagactttgctttcatcctaagaaacataaagggaaaaggatctcaatagtgtttcaatttttgtaagttaaattataaatttggaagatagcccgcgactttaaataaggttaaagaatcagacatttttaatatacgtatttaaatttgaatttaggaacaaacttatattttgactgctaaaaccgagtattgtagttgatattttgcccctttagaacattgtttttgagaaataagatggaaagcattataaatttgaatacttagttatgtattgttagatagcgtttatgctacttctgaattgaaatggttcatgaacttttgtaatctttggtttaaatttacattctctgtttttaaatggaaaatactttcattgtaatgattaatgtttcatttgttttcccctttaaacaattaagatctctcaggattaacactgcagagtaatggtaggtaatctgtttcttactactttctctttgttt

SEQ ID NO: 551 - DNA, 1030 bp, Homo sapiens
acttaaaatgtgatagtgtctgtgtgaatccatatcactacgaacgagttgtatcacctggaattggtaagtagactttgctttcatcctaagaaacataaagggaaaaggatctcaatagtgtttcaatttttgtaagttaaattataaatttggaagatagcccgcgactttaaataaggttaaagaatcagacatttttaatatacgtatttaaatttgaatttaggaacaaacttatattttgactgctaaaaccgagtattgtagttgatattttgcccctttagaacattgtttttgagaaataagatggaaagcattataaatttgaatacttagttatgtattgttagatagcgtttatgctacttctgaattgaaatggttcatgaacttttgtaatctttggtttaaatttacattctctgtttttaaatggaaaatactttcattgtaatgattaatgtttcatttgttttcccctttaaacaattaagatctctcaggattaacactgcagagtaatggtaggtaatctgtttcttactactttctctttgttttgtcctatcctctctgtttttttgttgacctagaattagtttgtgtgagcggcaggcagtaacattaacaagaaaataacttactgctttggaaatgtagattttgaggttaggggcatttaaaactggatttaaaactggatttaaattggctattgctctttgtatttgaactgcaatttatgaactaaagtactgtaaaaaaatatgatagaggaatgcaccaaaaacaaatataaagaatattttttgagttaagacctatttttgaagaaaatctcacagagccagtttaaatggatgttaaatacccagaatatttggtaatttggaatcacatataacatatcctttaaaaataccagtattctaattttccttcatttcagcctaacatttttatgaatgataatgttgagaatggtttaaaattgcactcttttgtattttttcagtcttgttac

SEQ ID NO: 552 - DNA, 1213 bp, Homo sapiens
cttaacaataattctagatcctgggattggatatctatcagatcccactcatatctccacagtgtgaaattaacaaaaagatatagttaaatactcagtctctatttagaccgaataattgtttttctcagctggacacattttccagccattcggtttttgcctgccttatgtatttaggtgattattcttctaggtttatcaagaaactgaggagtacctttttaggattgttgctggaggctgttgaaacatagactagcttcaaatttgagagtcagattgattgataaaatatatctcatgctgttaccgctgaataaatgacttttgctggtaaagtagtatgcttttaaaataatatgaaaaaattctgaattaaggttagtaatttacactgtaattgattttaggtgttattatattacttgctaataagatttttttttctgggaatagaagcttataaaaatttaaaatatgtttaattttctatatagctccatcaagtatgatggtgaaggatgaatatgtgcatgactttgagggacagccatcgttgtccactgaaggacattcaattcaaaccatccagcatccaccaagtaatcgtgcatcgacagagacatacagcaccccagctctgttagccccatctgagtctaatgctaccagcactgccaactttcccaacattcctgtggcttccacaagtgagttctagaatcagatgtagtcagcaagttgagttttcctaatcattgcttatttatgtgtagtcacttggggggaaactccaagtaagtaaacattaaaagtaactgtagtatctttcataggtaaacaggtattaaacaggtatgcacaatcacttggaatttaagtaatggctttgattataatattgatttaaattaatgatctgatttatactttactattacatgtagcagtaagtagcctcttaagctcccagatatattttggagaaatatttaaataattaacaagtagttttgatccaagatgtttatgaaggtctgtgttaatggaattgcaacctttcttttaatgcggtgttcttattttggtttttctgggacaatattaccttatagtagttgtctgattttctcactgtgcaaagggatcttgacaaatttgttatatattgctcaagatagacattaattaagtcaattttgatataagc

SEQ ID NO: 553 - DNA, 1120 bp, Homo sapiens
tatttaaaataattttctgctctgcttttctctgtcaaaccctagcattctgccattactagtatcagtgctgatagtgattaatttttcagttttcaacattttcttgagcctggatttttggggtcctaatcagaaaggtccagagagagaggtggatggagtggccaggatgaactgacatacctctgaagaagttaatatgataggccagacgtacagtggtgttttgctggcatttgaaatatgtttgtgaagaaataagccactacaattagttagacattacctaaaatggaataattttgagcttcctcaagttaaagtttgcctttatagatgactgtaggttttttacctgataggccatgggtgagttacactttttgcccatctttatagttgtgcattatcagataaaattggtccttcatttagtatatgaaatcataagatgacatctatgaatgtaccatgttaatgtcttcttgttcctctaggtcagcctgccagtatactggggggcagccatagtgaaggactgttgcagatagcatcagggcctcagccaggacagcagcagaatggatttactggtcagccagctacttaccatcatagtatgtacatactttaaaaaatcttttaaatagttgagaaaaaagtaggcagcctttataaaagcaaattaacccatgtgggccttaatttttagacagcactaccacctggactggaagtaggactgcaccatacacacctaatttgcctcaccaccaaaacggccatcttcagcaccacccgcctatgccgccccatcccggacattactgtaagctcttgtttttgttgtaagggctattttttttttttttttggtagggctttgttttctgttttttaaaaatgtttttacatcttttattcatcctgtgattttgtttcattaaatagtgcttttcagtattttttgtaaacagtattatttttcatagttatcctacctttttattttagaggagtgatgtttgctaaatacatttatttctctgttgctaatgtttcattaacatcacattgatttccattcatttgtttgtttgctttgtatatgttctta

SEQ ID NO: 554 - DNA, 1117 bp, Homo sapiens
cgtacagtggtgttttgctggcatttgaaatatgtttgtgaagaaataagccactacaattagttagacattacctaaaatggaataattttgagcttcctcaagttaaagtttgcctttatagatgactgtaggttttttacctgataggccatgggtgagttacactttttgcccatctttatagttgtgcattatcagataaaattggtccttcatttagtatatgaaatcataagatgacatctatgaatgtaccatgttaatgtcttcttgttcctctaggtcagcctgccagtatactggggggcagccatagtgaaggactgttgcagatagcatcagggcctcagccaggacagcagcagaatggatttactggtcagccagctacttaccatcatagtatgtacatactttaaaaaatcttttaaatagttgagaaaaaagtaggcagcctttataaaagcaaattaacccatgtgggccttaatttttagacagcactaccacctggactggaagtaggactgcaccatacacacctaatttgcctcaccaccaaaacggccatcttcagcaccacccgcctatgccgccccatcccggacattactgtaagctcttgtttttgttgtaagggctattttttttttttttttggtagggctttgttttctgttttttaaaaatgtttttacatcttttattcatcctgtgattttgtttcattaaatagtgcttttcagtattttttgtaaacagtattatttttcatagttatcctacctttttattttagaggagtgatgtttgctaaatacatttatttctctgttgctaatgtttcattaacatcacattgatttccattcatttgtttgtttgctttgtatatgttcttagatctcatctgtgtcttgtatatccacgcataatggattgaaaccctttgagtgctaagttctcaaggtttccctcagcgtagtattcagtgtactttggataatgttgaatctatagataactctgtgctggcatgattgggaggaataccctacagataacatgtagtttcaggtagaataggagcattgttcatatggcttagtaaaat

SEQ ID NO: 555 - DNA, 1051 bp, Homo sapiens
ctcaaggggtgttcgtaagaagtaaacgtaataatttatgtgaggtgtttagcacagtgttttaacacattaccagttttcaattatgttagctatgattccattaaataaacatccttaattaacataagcacttgtttttagaatagacctaacagtttattattatacattgcattataaattgtactgtattggacgttacatgaataattcatttatgatctgtattaaatgttggatataaaattatgtgtaaattgtgtaataatagcacttggcagatagcactgaaatgttagttattaaatatccacaaaagtattaatagtttaagactatttgcttattgtaaacttttaagttcttagacattgcataagcttgttttaaacaattcctaacctataatagttatatttaagtaagatttactgaaagttttagcattagacaacttttagtaaataaaaatggaatttttgttgtcttttctttagggcctgttcacaatgagcttgcattccagcctcccatttccaatcatcctggtaagtgtatttcaaaattgatttcctgtatttagattgatttagtggtgattgaaacgcacaaacacaggctttaatggaattatggggtcacttctcagatgagtacaatactcatcatgacatgagttaatcaacagtttgagtagtcaatatagtcacacatagactgtctatattttattcagtttaactgtccccaaaagaaaagaactatcttttcagctaaaatgagaattacagaaatgctgacttcagcattgaatacataaatatgcagcagaataaaactaggtttcaaaatagaacagctgtaaaactatagcttaaaaagccaggaaagaatcttaagtacatgccgaaaagaaaaataattcactctattcaggatctctggttaactggaatttagaaactatttgattaaattgtatgcaaaagagtaaatcgctaagtagctttcttcagttcaaagtttgtgtataatttttgaaactgta

SEQ ID NO: 556 - DNA, 1184 bp, Homo sapiens
aaaatatgtcatgagtcgatgttattcaaggacagttccctggaatacatcttagggtcagtgtgtttttaaaaaataaaagttgagactacatagagaatatgtgtagtcaaatgaaataccatggtaaaataatttattttagattctgattatttctgttctttaaattctcagttgacctggtcctttgaggtaagaaccaaattccagattttaaaaaatgacttttagaacttgaggataagtggtaattggaaattaaaaaaaaaaattagtgttttaagaacagtgctaagtactgagctagaaaatagaagacatggaaattcctaccttttaatgcattatgttattttaatccagttgttttgggtgcattacatttccatctcccctccctttaccctttcttttaggaaaaactgtgttgtggagtgcaagtgaaagccttatatctttctcatgggaggatgttctttcccatttatttcctatagctcctgagtattggtgttccattgcttactttgaaatggatgttcaggtaggagagacatttaaggttccttcaagctgccctattgttactgttgatggatacgtggacccttctggaggagatcgcttttgtttgggtcaactctccaatgtccacaggacagaagccattgagagagcaaggtattgattgtatagtcagatagttactttaaaaaattgagcatagtacattgtcttttattcaaggttatgttttcccatgtacattatatgtgttcttaaatataaataaaggaataaaggtcatgttgaaaactcagaatttgtaagcactccatcttaattgtcggtgtttttgttgtttaacatataatgataaaagatagccttttttatgttagtaggtttctatgtttcgaatagtaagtataccttttgaaattcagtttgaaaattttattttctgtgatcatacatttctacaaattactgaaaggaagtaatattaaatgagaacatgtttctgaaagttttacttataatgttaaaaaaattggtaataaaagggaaatggttaagtaaattatgataaatttttccttttttatacagtcattaaaatgtttaaaagtttatataatgaggctgggtgcggtggctcacacctataatcccagcac

SEQ ID NO: 557 - DNA, 1169 bp, Homo sapiens
tctaagccattctgcctaatagaattttctgtgatgaagaaaatgatttatatttgcactgtccagttcggtagccactagccacatgtaactattgagcacttaaattatagctcacttgattgactaatcggatttctaattagttttaatttaatttaaatagtcacatgtggctagtggctatcaatttggacagtatgccttagtttctttatctaaaaaaattagaataatagtacttgttgagttgtaagggtttaatgagaattcatactacatgctcctgacacatagtaagtgttgtaaatatgtgcatcattattagatatgaacaggaaaagaaaaaaggaaatatacaaaaatgttaatagctatcttttggttttatgtgatctttatttttaatttttcaatattaagcatgctatacaatctgaactaaaatttaatttaaaatacttatcaagataaaatgtaatttcttttttcttcctaaggttgcacataggcaaaggtgtgcagttggaatgtaaaggtgaaggtgatgtttgggtcaggtgccttagtgaccacgcggtctttgtacagagttactacttagacagagaagctgggcgtgcacctggagatgctgttcataagatctacccaagtgcatatataaaggttagttacaattttatttgaatattttagacttaaagctctatttgttgtcaaaagaattgaaatctgggtggaaggaatggaaaaatgttttatatattaaataataagaaattgtgtttaagtataaaaaacacattttctgagggcatttattgacattatcagtaatctagttttatcgttgccaatttgttacattttgttttttattttatttatttatttatttatttatttttgagacagagtcttgctctcgtcgcccaggctggaatgcagtggcgtgatctcggctcactgcaacctgcgcctcctgggttcaagcaattctcgtgcctcagcatcccaagtagctgggattacaggcacatgttactgtgcctggcaattttttgtatttttagtagagacggggtttcaccatgttggccaggctggtctcgaactcctgacctaaagtgatccgcccaacttggcctcccaaagtgctgggatta

SEQ ID NO: 558 - DNA, 1139 bp, Homo sapiens
tctatttgcttaaagtacgcatctctgaaaaatgttgatctctcttatatagcgacagtgccattttgttaaactcctccaaataagcaaaaatgataagacaaaaagttggccaggcgaccaaagctatcaactccagcctaaggaaaattcagcaatttgattatgaaagggggagggggacttcttaattgtacattttacacagatttccacaaggacagtaatagctgacccacttcgaactagataaaagatacagaggcgtgtggcagccaaagccatcatgatgttgacatgatcttcttggtgagctccaagccacctttcctaactagttttagaccaatcacaatgtacataaaagtttacatgttttaattaattcttttcatgtgagaggtataatgaaactgagttttaaataagtcaggcattggtttttaatgtatggaatttttctttatgaactcatagtatgaaatgttttttcttaaaaggtctttgatttgcgtcagtgtcatcgacagatgcagcagcaggcggctactgcacaagctgcagcagctgcccaggcagcagccgtggcaggaaacatccctggcccaggatcagtaggtggaatagctccagctatcagtaagtatgcttttcattcttttttaaaggtataatagttgatatttttatcttgatttactcagttgattagtttctttgagcagtaatagaaattaaagtttttttttactgggatgatgacatttttgaattggtaaaatctgttcttctgtaatagttgctttttgcctatgaccctgtttgcattctttttgtatcaaaaatggagtatgggatgaaggagaaaggggatgattattatattatactgttctatctcctccttttttgttgatgcttattataattctgcctcaccagccagggtgggttgtaatcactgaagtgcttggctttattctagtaaggaaagcatatttcaatttcagaattggacacttttccaattttttttttaaagtatgctaaacatggagagaaaactaagtgagggtggtattttgataacttgtagacttttttttaattttagggtaaaattgaactgtgtgccaggt

SEQ ID NO: 559 - DNA, 7786 bp, Homo sapiens
tgagtaatagtgtattactctgttacactttgaaattgagagagagacttcatctcggtcatctaagaggtcttagtggaactaagaatattaactgcttcattattagttatgtcttattctgaactaggctgtttagacagtaaggtttttagaagcaacctgtggacacgcactacctcttaaaaacaagttgtttcttatcccttcacctccacttctaaagaaaaaaataggtgaggtgttggtggattgtggtaatttactttataattggttgtagctagaagacacatgtgaaatgtaaagttccttaaccaaaagtgtgcagcttgttgataaagtttagatctactgttacttcttggcactttagcagagaagttatatgctgaggagaatgaaatacagaaagctggtcacttgattaatttagaatgtagggaggatgggaagagatcaccctgtccctctgatgtcttccaaatcttttctgttaggtctgtcagctgctgctggaattggtgttgatgaccttcgtcgcttatgcatactcaggatgagttttgtgaaaggctggggaccggattacccaagacagagcatcaaagaaacaccttgctggattgaaattcacttacaccgggccctccagctcctagacgaagtacttcataccatgccgattgcagacccacaacctttagactgaggtcttttaccgttggggcccttaaccttatcaggatggtggactacaaaatacaatcctgtttataatctgaagatatatttcacttttgttctgctttatcttttcataaagggttgaaaatgtgtttgctgccttgctcctagcagacagaaactggattaaaacaattttttttttcctcttcagaacttgtcaggcatggctcagagcttgaagattaggagaaacacattcttattaattcttcacctgttatgtatgaaggaatcattccagtgctagaaaatttagccctttaaaacgtcttagagccttttatctgcagaacatcgatatgtatatcattctacagaataatccagtattgctgattttaaaggcagagaagttctcaaagttaattcacctatgttattttgtgtacaagttgttattgttgaacatacttcaaaaataatgtgccatgtgggtgagttaattttaccaagagtaactttactctgtgtttaaaaagtaagttaataatgtattgtaatctttcatccaaaatattttttgcaagttatattagtgaagatggtttcaattcagattgtcttgcaacttcagttttatttttgccaaggcaaaaaactcttaatctgtgtgtatattgagaatcccttaaaattaccagacaaaaaaatttaaaattacgtttgttattcctagtggatgactgttgatgaagtatacttttcccctgttaaacagtagttgtattcttctgtatttctaggcacaaggttggttgctaagaagcctataagaggaatttcttttccttcattcatagggaaaggttttgtattttttaaaacactaaaagcagcgtcactctacctaatgtctcactgttctgcaaaggtggcaatgcttaaactaaataatgaataaactgaatattttggaaactgctaaattctatgttaaatactgtgcagaataatggaaacattacagttcataataggtagtttggatatttttgtacttgatttgatgtgactttttttggtataatgtttaaatcatgtatgttatgatattgtttaaaattcagtttttgtatcttggggcaagactgcaaacttttttatatcttttggttattctaagccctttgccatcaatgatcatatcaattggcagtgactttgtatagagaatttaagtagaaaagttgcagatgtattgactgtaccacagacacaatatgtatgctttttacctagctggtagcataaataaaactgaatctcaacatacaaagttgaattctaggtttgatttttaagattttttttttcttttgcacttttgagtccaatctcagtgatgaggtaccttctactaaatgacaggcaacagccagttctattgggcagctttgtttttttccctcacactctaccgggacttccccatggacattgtgtatcatgtgtagagttggttttttttttttttaatttttattttactatagcagaaatagacctgattatctacaagatgataaatagattgtctacaggataaatagtatgaaataaaatcaaggattatctttcagatgtgtttacttttgcctggagaacttttagctatagaaacacttgtgtgatgatagtcctccttatatcacctggaatgaacacagcttctactgccttgctcagaaggtcttttaaatagaccatcctagaaaccactgagtttgcttatttctgtgatttaaacatagatcttgatccaagctacatgacttttgtctttaaataacttatctaccacctcatttgtactcttgattacttacaaattctttcagtaaacacctaattttcttctgtaaaagtttggtgatttaagttttattggcagttttataaaaagacatcttctctagaaattgctaactttaggtccattttactgtgaatgaggaataggagtgagttttagaataacagatttttaaaaatccagatgatttgattaaaaccttaatcatacattgacataattcattgcttcttttttttgagatatggagtcttgctgtgttgcccaggcaggagtgcagtggtatgatctcagctcactgcaacctctgcctcccgggttcaactgattctcctgcctcagcctccctggtagctaggattacaggtgcccgccaccatgcctggctaacttttgtagttttagtagagacggggttttgcctgttggccaggctggtcttgaactcctgacctcaagtgatccatccaccttggcctcccaaagtgctgggattacgggcgtgagccactgtccctggcctcattgttcccttttctactttaaggaaagttttcatgtttaatcatctggggaaagtatgtgaaaaatatttgttaagaagtatctctttggagccaagccacctgtcttggtttctttctactaagagccataaagtatagaaatacttctagttgttaagtgcttatatttgtacctagatttagtcacacgcttttgagaaaacatctagtatgttatgatcagctattcctgagagcttggttgttaatctatatttctatttcttagtggtagtcatctttgatgaataagactaaagattctcacaggtttaaaattttatgtctactttaagggtaaaattatgaggttatggttctgggtgggttttctctagctaattcatatctcaaagagtctcaaaatgttgaatttcagtgcaagctgaatgagagatgagccatgtacacccaccgtaagacctcattccatgtttgtccagtgcctttcagtgcattatcaaagggaatccttcatggtgttgcctttattttccggggagtagatcgtgggatatagtctatctcatttttaatagtttaccgcccctggtatacaaagataatgacaataaatcactgccatataaccttgctttttccagaaacatggctgttttgtattgctgtaaccactaaataggttgcctataccattcctcctgtgaacagtgcagatttacaggttgcatggtctggcttaaggagagccatacttgagacatgtgagtaaactgaactcatattagctgtgctgcatttcagacttaaaatccatttttgtggggcagggtgtggtgtgtaaaggggggtgtttgtaatacaagttgaaggcaaaataaaatgtcctgtctcccagatgatatacatcttattatttttaaagtttattgctaattgtaggaaggtgagttgcaggtatctttgactatggtcatctggggaaggaaaattttacattttactattaatgctccttaagtgtctatggaggttaaagaataaaatggtaaatgtttctgtgcctggtttgatggtaactggttaatagttactcaccattttatgcagagtcacattagttcacaccctttctgagagccttttgggagaagcagttttattctctgagtggaacagagttctttttgttgataatttctagtttgctcccttcgttattgccaactttactggcattttatttaatgatagcagattgggaaaatggcaaatttaggttacggaggtaaatgagtatatgaaagcaattacctctaaagccagttaacaattattttgtaggtggggtacactcagcttaaagtaatgcatttttttttcccgtaaaggcagaatccatcttgttgcagatagctatctaaataatctcatatcctcttttgcaaagactacagagaataggctatgacaatcttgttcaagcctttccatttttttccctgataactaagtaatttctttgaacataccaagaagtatgtaaaaagtccatggccttattcatccacaaagtggcatcctaggcccagccttatccctagcagttgtcccagtgctgctaggttgcttatcttgtttatctggaatcactgtggagtgaaattttccacatcatccagaattgccttatttaagaagtaaaacgttttaatttttagcctttttttggtggagttatttaatatgtatatcagaggatatactagatggtaacatttctttctgtgcttggctatctttgtggacttcaggggcttctaaaacagacaggactgtgttgcctttactaaatggtctgagacagctatggttttgaatttttagttttttttttttaacccacttcccctcctggtctcttccctctctgataattaccattcatatgtgagtgttagtgtgcctccttttagcattttcttcttctctttctgattcttcatttctgactgcctaggcaaggaaaccagataaccaaacttactagaacgttctttaaaacacaagtacaaactctgggacaggacccaagacactttcctgtgaagtgctgaaaaagacctcattgtattggcatttgatatcagtttgatgtagcttagagtgcttcctgattcttgctgagtttcaggtagttgagatagagagaagtgagtcatattcatattttcccccttagaataatattttgaaaggtttcattgcttccacttgaatgctgctcttacaaaaactggggttacaagggttactaaattagcatcagtagccagaggcaataccgttgtctggaggacaccagcaaacaacacacaacaaagcaaaacaaaccttgggaaactaaggccatttgttttgttttggtgtcccctttgaagccctgccttctggccttactcctgtacagatatttttgacctataggtgcctttatgagaattgagggtctgacatcctgccccaaggagtagctaaagtaattgctagtgttttcagggattttaacatcagactggaatgaatgaatgaaactttttgtcctttttttttctgtttttttttttctaatgtagtaaggactaaggaaaacctttggtgaagacaatcatttctctctgttgatgtggatacttttcacaccgtttatttaaatgctttctcaataggtccagagccagtgttcttgttcaacctgaaagtaatggctctgggttgggccagacagttgcactctctagtttgccctctgccacaaatttgatgtgtgacctttgggcaagtcatttatcttctctgggccttagttgcctcatctgtaaaatgagggagttggagtagattaattattccagctctgaaattctaagtgaccttggctaccttgcagcagttttggatttcttccttatctttgttctgctgtttgagggggctttttacttatttccatgttattcaaaggagactaggcttgatattttattactgttcttttatggacaaaaggttacatagtatgcccttaagacttaattttaaccaaaggcctagcaccaccttaggggctgcaataaacacttaacgcgcgtgcgcacgcgcgcgcgcacacacacacacacacacacacacacacacaggtcagagtttaaggctttcgagtcatgacattctagcttttgaattgcgtgcacacacacacgcacgcacacactctggtcagagtttattaaggctttcgagtcatgacattatagcttttgagttggtgtgtgtgacaccaccctcctaagtggtgtgtgcttgtaattttttttttcagtgaaaatggattgaaaacctgttgttaatgcttagtgatattatgctcaaaacaaggaaattcccttgaaccgtgtcaattaaactggtttatatgactcaagaaaacaataccagtagatgattattaactttattcttggctctttttaggtccattttgattaagtgacttttggctggatcattcagagctctcttctagcctacccttggatgagtacaattaatgaaattcatattttcaaggacctgggagccttccttggggctgggttgagggtggggggttggggagtcctggtagaggccagctttgtggtagctggagaggaagggatgaaaccagctgctgttgcaaaggctgcttgtcattgatagaaggactcacgggcttggattgattaagactaaacatggagttggcaaactttcttcaagtattgagttctgttcaatgcattggacatgtgatttaagggaaaagtgtgaatgcttatagatgatgaaaacctggtgggctgcagagcccagtttagaagaagtgagttgggggttggggacagatttggtggtggtatttcccaactgtttcctcccctaaattcagaggaatgcagctatgccagaagccagagaagagccactcgtagcttctgctttggggacaactggtcagttgaaagtcccaggagttcctttgtggctttctgtatacttttgcctggttaaagtctgtggctaaaaaatagtcgaacctttcttgagaactctgtaacaaagtatgtttttgattaaaagagaaagccaactaaatcattatgtgctcattctttttcttaagcttgtggatgtcttggatctggaaagggtttctgatcacttagagaattttcaaactttaggtcaacattttcctttattgccttgtggccactgaaatgggaaatgtgacatttaaaatatgaccctggaataacagtccccattcttctctcatttttaaaaggagaaggtgaagtgatggtgatcagagagatgggtgctagggaattataagaaccaggatgcttaaaggagaggtaaaattggaaattggagaccctttcattgcccagctaagggataaggaaagctgtttctctcccatctgccttctctgtgaaataggggtcaatgggaggggagtggtggtcaggtaagtagattccgtggcaatggcttgtatataacaagaccacatcagcattttatttctaagcttgctgacatgagtttcagagagtttatcgggctgagagatttcttctcacct

SEQ ID NO: 560 - DNA, 1500 bp, Homo sapiens
tttgtggtagctggagaggaagggatgaaaccagctgctgttgcaaaggctgcttgtcattgatagaaggactcacgggcttggattgattaagactaaacatggagttggcaaactttcttcaagtattgagttctgttcaatgcattggacatgtgatttaagggaaaagtgtgaatgcttatagatgatgaaaacctggtgggctgcagagcccagtttagaagaagtgagttgggggttggggacagatttggtggtggtatttcccaactgtttcctcccctaaattcagaggaatgcagctatgccagaagccagagaagagccactcgtagcttctgctttggggacaactggtcagttgaaagtcccaggagttcctttgtggctttctgtatacttttgcctggttaaagtctgtggctaaaaaatagtcgaacctttcttgagaactctgtaacaaagtatgtttttgattaaaagagaaagccaactaaatcattatgtgctcattctttttcttaagcttgtggatgtcttggatctggaaagggtttctgatcacttagagaattttcaaactttaggtcaacattttcctttattgccttgtggccactgaaatgggaaatgtgacatttaaaatatgaccctggaataacagtccccattcttctctcatttttaaaaggagaaggtgaagtgatggtgatcagagagatgggtgctagggaattataagaaccaggatgcttaaaggagaggtaaaattggaaattggagaccctttcattgcccagctaagggataaggaaagctgtttctctcccatctgccttctctgtgaaataggggtcaatgggaggggagtggtggtcaggtaagtagattccgtggcaatggcttgtatataacaagaccacatcagcattttatttctaagcttgctgacatgagtttcagagagtttatcgggctgagagatttcttctcacctgtttgctaacctgaaatttatagtattttaggctagaacttgaagaggatagtaggttagcattcagttgagaaaaaggaaaaacattgtggagcacttcaggtgaaagggcagttgtgtgtctctctgccttctgctcttgacccttaattctttgtgcttaattccatctcctcccacgtcacaactctctcacaaatggcagtctcaaagcttagggaatctccatcacttcttcaaacctttcccacccctgttgtcttactgataaattgtaatgccctttctcctcagccctttgtattctaaaagaataattccattagttctggcctacttttggagtggcatccacatctatattttgatagttttgttaggccaccactaggtctcagacagatggacaagaggcgttcagggagagcagacaatccattgccagcagacctaccttaatcgagtggtagtaaaggaagttccctaagcagaaaagaaag

SEQ ID NO: 561 - DNA, 3277 bp, Homo sapiens
gcgtgtcgggcgcggaagggggaggcggcccggggcgcccgcgagtgaggcgcggggcggcgaagggagcgcgggtggcggcacttgctgccgcggccttggatgggctgggcccccctcgccgctccgcctcctccacacgcgcggcggccgcggcgagggggacgcgccgcccggggcccggcaccttcgggaaccccccggcccggagcctgcggcctgcgccgcctcggccgccgggagccccgtggagcccccgccgccgcgccgccccgcggaccggacgctgagggcactcggggcggggcgcgcgctcgggcagacgtttgcggggaggggggcgcctgccgggccccggcgaccaccttgggggtcgcgggccggctcggggggcgcccagtgcgggccctcgcgggcgccgggcagcgaccagccctgagcggagctgttggccgcggcgggaggcctcccggacgcccccagccccccgaacgctcgcccgggccggcgggagtcggcgccccccgggaggtccgctcggtcgtccgcggcggagcgtttgctcctgggacaggcggtgggaccggggcgtcgccggagacgcccccagcgaagttgggctctccaggtgtgggggtcccggggggtagcgacgtcgcggacccggcctgtgggatgggcggcccggagaagactgcgctcggccgtgttcatacttgtccgtgggcctgaggtccccggaggatgacctagcactgaaaagccccggccggcctccccagggtccccgaggacgaagttgaccctgaccgggccgtctcccagttctgaggcccgggtcccactggaactcgcgtctgagccgccgtcccggacccccggtgcccgccggtccgcagaccctgcaccgggcttggactcgcagccgggactgacgtgtagaacaatcgtttctgttggaagaagggtttttcccttccttttggggtttttgttgccttttttttttcttttttctttgtaaaattttggagaagggaagtcggaacacaaggaaggaccgctcacccgcggactcagggctggcggcgggactccaggaccctgggtccagcatggaggtggtggacccgcagcagctgggcatgttcacggagggcgagctgatgtcggtgggtatggacacgttcatccaccgcatcgactccaccgaggtcatctaccagccgcgccgcaagcgggccaagctcatcggcaagtacctgatgggggacctgctgggggaaggctcttacggcaaggtgaaggaggtgctggactcggagacgctgtgcaggagggccgtcaagatcctcaagaagaagaagttgcgaaggatccccaacggggaggccaacgtgaagaaggaaattcaactactgaggaggttacggcacaaaaatgtcatccagctggtggatgtgttatacaacgaagagaagcagaaaatgtatatggtgatggagtactgcgtgtgtggcatgcaggaaatgctggacagcgtgccggagaagcgtttcccagtgtgccaggcccacgggtacttctgtcagctgattgacggcctggagtacctgcatagccagggcattgtgcacaaggacatcaagccggggaacctgctgctcaccaccggtggcaccctcaaaatctccgacctgggcgtggccgaggcactgcacccgttcgcggcggacgacacctgccggaccagccagggctccccggctttccagccgcccgagattgccaacggcctggacaccttctccggcttcaaggtggacatctggtcggctggggtcaccctctacaacatcaccacgggtctgtaccccttcgaaggggacaacatctacaagttgtttgagaacatcgggaaggggagctacgccatcccgggcgactgtggccccccgctctctgacctgctgaaagggatgcttgagtacgaaccggccaagaggttctccatccggcagatccggcagcacagctggttccggaagaaacatcctccggctgaagcaccagtgcccatcccaccgagcccagacaccaaggaccggtggcgcagcatgactgtggtgccgtacttggaggacctgcacggcgcggacgaggacgaggacctcttcgacatcgaggatgacatcatctacactcaggacttcacggtgcccggacaggtcccagaagaggaggccagtcacaatggacagcgccggggcctccccaaggccgtgtgtatgaacggcacagaggcggcgcagctgagcaccaaatccagggcggagggccgggcccccaaccctgcccgcaaggcctgctccgccagcagcaagatccgccggctgtcggcctgcaagcagcagtgaggctggccgcctgcagcccgtgtccaggagccccgccaggtgcccgcgccaggccctcagtcttcctgccggttccgcccgccctcccggagaggtggccgccatgcttctgtgccgaccacgccccaggacctccggagcgccctgcagggccgggcagggggacagcagggaccgggcgcagccctcccccctcggccgcccggcagtgcacgcggcttgttgacttcgcagccccgggcggagccttcccgggcgggcgtgggaggagggaggcggcctccatgcactttatgtggagactactggccccgcccgtggcctcgtgctccgcagggcgcccagcgccgtccggcggccccgccgcagaccagctggcgggtgtggagaccaggctcctgaccccgccatgcatgcagcgccacctggaagccgcgcggccgctttggttttttgtttggttggttccattttctttttttctttttttttttaagaaaaaataaaaggtggatttgagctgtggctgtgaggggtgtttgggagctgctgggtggcaggggggctgtggggtcgggctcacgtcgcggccgcctttgcgctctcgggtcaccctgctttggcggcccggccggagggcaggaccctcacctctcccccaaggccactgcgctcttgggaccccagagaaaacccggagcaagcaggagtgtgcggtcaatatttatatcatccagaaaagaaaaacacgagaaacgccatcgcgggatggtgcagacgcggcggggactcggagggtgccgtgcgggcgaggccgcccaaatttggcaataaataaagcttgggaagcttggacctga

SEQ ID NO: 562 - DNA, 1500 bp, Homo sapiens
agctggagtgcagtggcacgatctcggctcaccgcaacctcctcctcccgggttcaagcgattctcctccctcagccttctgagtagctgggattacagacatgcacctgtaatttctactaaaaatacaaaaattagccgggcgtggtggcgcacgcctgtaatctcagctactggggaggctgaggcaggagaatcgcttgaaaccaggaggcggagattgtaccaagatagtttgttccagctaaacaacctggcgctagtgcaggaaaaggtggaaggcacggggctagcacaggagggttcaatattttcaaccttatcaagccatattttggcaactcttgtttttcacgagaagcccccgctgggcttgtcccagcgctgtcctgaggcttcccccatgagttccgatagggcagaggccgccctgagcgtttctctttcccctggtccaagagtggctcaaaagaaggatttttgactggaattggccactttgtgttactttttgacccttgacctcgccccaaagggggatgcgggggaggggctctggtaggggtggccccgctccttccaggtccgcaagcccaggttcccgcccaccgggctcagcccaccctgcggccgttcagggaggccgttggcacccgtgacctacgacccccttcccgagccccaccgaggtcacagccgtggcctcgtctccccatgcctgcttcccgccccctgcccgtgacgggcgtctccgaggaccaatgagcgcgctgtatccacccctcgggcggggccaagcgccgaccaatcgccgctcgggcgcccggccgggtccaaacgctccaatcgtcagcggcggcggggcgggcagagggccggggatggcaggttcaaccaacgggtgggcacgtcgtcctcgcgaggaggcgtgccctgcggccgggcgtgcggtgtccgcggcggcgcagggagggggagggaggtaaacaagatggcggcggcgtgtcgggcgcggaagggggaggcggcccggggcgcccgcgagtgaggcgcggggcggcgaagggagcgcgggtggcggcacttgctgccgcggccttggatgggctgggcccccctcgccgctccgcctcctccacacgcgcggcggccgcggcgagggggacgcgccgcccggggcccggcaccttcgggaaccccccggcccggagcctgcggcctgcgccgcctcggccgccgggagccccgtggagcccccgccgccgcgccgccccgcggaccggacgctgagggcactcggggcggggcgcgcgctcgggcagacgtttgcggggaggggggcgcctgccgggccccggcgaccaccttgggggtcgcgggccggctcggggggcgcccagtgcgggccctcgcgggcgccgggcagcgaccagccctgagcggagctgttggccgcggcgggaggcctcccggacgcccccagccccccgaacgctcgcc

SEQ ID NO: 563 - DNA, 2405 bp, Homo sapiens
tgtgttactttttgacccttgacctcgccccaaagggggatgcgggggaggggctctggtaggggtggccccgctccttccaggtccgcaagcccaggttcccgcccaccgggctcagcccaccctgcggccgttcagggaggccgttggcacccgtgacctacgacccccttcccgagccccaccgaggtcacagccgtggcctcgtctccccatgcctgcttcccgccccctgcccgtgacgggcgtctccgaggaccaatgagcgcgctgtatccacccctcgggcggggccaagcgccgaccaatcgccgctcgggcgcccggccgggtccaaacgctccaatcgtcagcggcggcggggcgggcagagggccggggatggcaggttcaaccaacgggtgggcacgtcgtcctcgcgaggaggcgtgccctgcggccgggcgtgcggtgtccgcggcggcgcagggagggggagggaggtaaacaagatggcggcggcgtgtcgggcgcggaagggggaggcggcccggggcgcccgcgagtgaggcgcggggcggcgaagggagcgcgggtggcggcacttgctgccgcggccttggatgggctgggcccccctcgccgctccgcctcctccacacgcgcggcggccgcggcgagggggacgcgccgcccggggcccggcaccttcgggaaccccccggcccggagcctgcggcctgcgccgcctcggccgccgggagccccgtggagcccccgccgccgcgccgccccgcggaccggacgctgagggcactcggggcggggcgcgcgctcgggcagacgtttgcggggaggggggcgcctgccgggccccggcgaccaccttgggggtcgcgggccggctcggggggcgcccagtgcgggccctcgcgggcgccgggcagcgaccagccctgagcggagctgttggccgcggcgggaggcctcccggacgcccccagccccccgaacgctcgcccgggccggcgggagtcggcgccccccgggaggtccgctcggtcgtccgcggcggagcgtttgctcctgggacaggcggtgggaccggggcgtcgccggagacgcccccagcgaagttgggctctccaggtgtgggggtcccggggggtagcgacgtcgcggacccggcctgtgggatgggcggcccggagaagactgcgctcggccgtgttcatacttgtccgtgggcctgaggtccccggaggatgacctagcactgaaaagccccggccggcctccccagggtccccgaggacgaagttgaccctgaccgggccgtctcccagttctgaggcccgggtcccactggaactcgcgtctgagccgccgtcccggacccccggtgcccgccggtccgcagaccctgcaccgggcttggactcgcagccgggactgacgtgtagaacaatcgtttctgttggaagaagggtttttcccttccttttggggtttttgttgccttttttttttcttttttctttgtaaaattttggagaagggaagtcggaacacaaggaaggaccgctcacccgcggactcagggctggcggcgggactccaggaccctgggtccagcatggaggtggtggacccgcagcagctgggcatgttcacggagggcgagctgatgtcggtgggtatggacacgttcatccaccgcatcgactccaccgaggtcatctaccagccgcgccgcaagcgggccaagctcatcggcaagtacctgatgggggacctgctgggggaaggctcttacggcaaggtgaaggaggtgctggactcggagacgctgtgcaggagggccgtcaagatcctcaagaagaagaagttgcgaaggatccccaacggggaggccaacgtgaagaagtaagtatggcttgctggggtcggggccgggccgggccagtcacggtgctgatggttctgtcttccttccttctctcctccctccctcccttacttcctcttaacaccctgagctggacccgtctggcgcctgtgtcctccgtgccagggagagcgtggttgggggcctgcgttacggactttcactcaggcaaggccagttgtcgcagcggggcgtgcgtttgcatgggctcttggactccagttaaaatgccctggtagcgaaaccctcctgagaagggagcggcccccaatcccctaagactagccccttggctcccccagctgtccaaggagcagaggcgcccagtggaatcagcctgtgtttgtttgggccccgagagtttgtgtgcggccgccaacacgttttctgcgcagtgtgtggccgttaccggggccaggcgaaatgtgatttgtttatcctgtcagaggggaaccctgggctgccaaaaataactgtt

SEQ ID NO: 564 - DNA, 1084 bp, Homo sapiens
ggcggatcacaaggtcaggagatcgagaccatcctggccaacatggtgaaaccctgtctgtactaaaatacaaaaaaattagccggctgtggtgacacgtgcctgtagtcccagctactcgggaggctgaggcagggaaatcacttgaacctgggaggcagaggttgcagtgagctgagatcgggccaccgtgctccagcctagggacagagcaagactctgtctcagaaaaaaaaaaaagtgtcctaactgtgtcctccaaagccctcgccggccgatgacagactagagggcgctgtgctcccaccccctaccgccctgagcctggacgcgtggcccctgcagggccctttcccacagcactgtgaactcacagcttctctctagggaagggaggaggtacgccacttccacagggagatggggaggccgactccagggatccaggccatcatcctgacgttgggtcggctgatacacccctgtcctctctgtcccagggaaattcaactactgaggaggttacggcacaaaaatgtcatccagctggtggatgtgttatacaacgaagagaagcagaaaatatatcctttccggtgttgggaccgcggggcctccgtgggaggggctggggccctgggtccgcctgcctcgaggcctgctcctcttcccgtctccttgaaggagactggcacacgagggccgtggccttccctggttccccggaagtcagccattgtggcaatggctgcgcagcttgctgaaaggggccctgagccctggcccctgtgtcttgggcccgtggggtgtcaagtcccttttttctcagagtctcctcccaggctaaccaggggtgtagccacggtctgcctgagacaggccacgcgggctgaccgttgtgggccattttggtcgtggctgggcgtgtcctcgtgtcatctgtggacacccccatgggtcttacgggcacagcctccctacggggactttgcttcctaaggccctgtgcccagagcaagagccagaagtggtcctgaggctggggctgtgttccctgagccacgcggtcaggggccctgggacc

SEQ ID NO: 565 - DNA, 1090 bp, Homo sapiens
tttggtcgtggctgggcgtgtcctcgtgtcatctgtggacacccccatgggtcttacgggcacagcctccctacggggactttgcttcctaaggccctgtgcccagagcaagagccagaagtggtcctgaggctggggctgtgttccctgagccacgcggtcaggggccctgggaccgtcctgcatgggcccgagcctgcttgggggggcgtccaggaggcaccatcccccgcccatgggcagggtgggggacgtgagccccgcaggaacgctgccccaagagtcagccctgtcctccccttccccgtaggctccttcctcctgggacgctggggcccctgggccttttcagaggggtggctgagggcagggtgggccctggtcccgaggaggggcaaggtgggtgcagagggtccctccagagccccttttctggcccccgtgctccctgggcctgtgagtggggccgccccctgagctgtgtgtccttagcgccccacgtatatggtgatggagtactgcgtgtgtggcatgcaggaaatgctggacagcgtgccggagaagcgtttcccagtgtgccaggcccacgggtgcgtgcgcggggcaggggccagggtggggcgggggccgggggccaggcagggcaggctcctttccgtgaggccacactgcttgtcctgatattcattgacatgaaggcccaagtttttttgtttttttgtttttttgtgttttttttcgagatggagtctcactctgtcgcccaggctggagtgcaatggtgcgatctcggctcactgcaagctccgcctccgaggttcacgccattcttctgcctcagcttcccgagtagctgggattacaggcgcccgccaccacgcccggctaattttttgtatttttagtagagacggggtttcaccgtgttagccaggatggtctcaaactcctgacctcgtgatccgcctgcctcagcctcccaaagtgctgggattacaggcatgagctaccacgcccggccttgtaaaggcccaagtttttaaaaacagttttggggtcccccatgtgtggcatccacaggcagggctgc

SEQ ID NO: 566 - DNA, 1133 bp, Homo sapiens
ttttggggtcccccatgtgtggcatccacaggcagggctgctgccaacctcccgcctccatctttgctgggcctgctgcctgaggccagtggcctgcttccagcccatcgctggcagccgcctgccctgaccagatctcctggatgcaggtctgtggcctcagagtcagggccccttgctgctgcaggaccacaggggcagggaggggcctgctgttccagcaagactttggggtgcagccggcctgtggcccacaggaaaatgagacctgtggacatccggggccctgccagacgtggctcggccggacgagggtggccactgcaggcgcaggtgtggctccctgctggacctagcctttcctctgtcctgtgtgcctggacttctgtgacttcccagctgggcctgtggtgtttgggaggctcccaggcagctgcaaaggggacccctgtgaggggcagggaggcctcggccccaggacgggtgtgtgctgcccgcaggtacttctgtcagctgattgacggcctggagtacctgcatagccagggcattgtgcacaaggacatcaagccggggaacctgctgctcaccaccggtggcaccctcaaaatctccgacctgggcgtggccgaggtaggcacgtgctagggggggccctggggcgccccctcccgggcactccctgagggctgcacggcaccgccacaggcactgcacccgttcgcggcggacgacacctgccggaccagccagggctccccggctttccagccgcccgagattgccaacggcctggacaccttctccggcttcaaggtggacatctggtcggctggggtcaccctgtaagtgccccgcccccccgggcactcaccacacgcacactccgaggggcctctgcgtcttgggcagctgccggcctgtgggcgcagggcgtggccaccggcccagaccctctctggccacagccgctagggggtgcttactttatggaaatgtaactcatacggcagatggtggttcacccgtgtgaagtgcagcctggcccgtcagggatcttcacagagtggcacggccgaccctcctcccagagccccacagggaagctgggcgggtgacagcagctccaggcc

SEQ ID NO: 567 - DNA, 1137 bp, Homo sapiens
cctgctgttccagcaagactttggggtgcagccggcctgtggcccacaggaaaatgagacctgtggacatccggggccctgccagacgtggctcggccggacgagggtggccactgcaggcgcaggtgtggctccctgctggacctagcctttcctctgtcctgtgtgcctggacttctgtgacttcccagctgggcctgtggtgtttgggaggctcccaggcagctgcaaaggggacccctgtgaggggcagggaggcctcggccccaggacgggtgtgtgctgcccgcaggtacttctgtcagctgattgacggcctggagtacctgcatagccagggcattgtgcacaaggacatcaagccggggaacctgctgctcaccaccggtggcaccctcaaaatctccgacctgggcgtggccgaggtaggcacgtgctagggggggccctggggcgccccctcccgggcactccctgagggctgcacggcaccgccacaggcactgcacccgttcgcggcggacgacacctgccggaccagccagggctccccggctttccagccgcccgagattgccaacggcctggacaccttctccggcttcaaggtggacatctggtcggctggggtcaccctgtaagtgccccgcccccccgggcactcaccacacgcacactccgaggggcctctgcgtcttgggcagctgccggcctgtgggcgcagggcgtggccaccggcccagaccctctctggccacagccgctagggggtgcttactttatggaaatgtaactcatacggcagatggtggttcacccgtgtgaagtgcagcctggcccgtcagggatcttcacagagtggcacggccgaccctcctcccagagccccacagggaagctgggcgggtgacagcagctccaggccccttccccgggtgggtccagaggacactcccctcctaccccgtagcctccactagtggaaggtggtgaagacagaggtgtccttgagtccacagggcctctggtccagcagccacgggacgcctctgtccctggggtagagctggggctcctagggcgtcaaccaccttgactgaccacgcctttcttccctcccctcgaaatgaagctaca

SEQ ID NO: 568 - DNA, 1128 bp, Homo sapiens
accctgtaagtgccccgcccccccgggcactcaccacacgcacactccgaggggcctctgcgtcttgggcagctgccggcctgtgggcgcagggcgtggccaccggcccagaccctctctggccacagccgctagggggtgcttactttatggaaatgtaactcatacggcagatggtggttcacccgtgtgaagtgcagcctggcccgtcagggatcttcacagagtggcacggccgaccctcctcccagagccccacagggaagctgggcgggtgacagcagctccaggccccttccccgggtgggtccagaggacactcccctcctaccccgtagcctccactagtggaaggtggtgaagacagaggtgtccttgagtccacagggcctctggtccagcagccacgggacgcctctgtccctggggtagagctggggctcctagggcgtcaaccaccttgactgaccacgcctttcttccctcccctcgaaatgaagctacaacatcaccacgggtctgtaccccttcgaaggggacaacatctacaagttgtttgagaacatcgggaaggggagctacgccatcccgggcgactgtggccccccgctctctgacctgctgaaaggtgggagcctcatccctctgcccgcagccccagggaggcggggcttttgtgcagaaatgtagggttgggggtgtcaggtggggggctattggccccgagaccccagcaggcattgagaggactgagtggagaggccgacctccccgcagggcctggtttgccaggtccctcagctccaccctgcttctgggccctgttcaccctccgaactcccaccccagagggcagtgctgccctgcgcctcccccagccccaccctcgggggctccctggcttgcagggtctgtcagggttgtcctgctgcacttcctacgcatggcagcaggtggcactggccgtccgtccatctgcccagtggccttgggagaacggaaccgccctggccgtccagcccagccctgtctccctgccagccgcgcacaggctgtccccggcatgtcccaggagtggagtggcctctgtcagggagaccgcctgtgcgcggggtcccccttaggagc

SEQ ID NO: 569 - DNA, 1058 bp, Homo sapiens
ggcattgagaggactgagtggagaggccgacctccccgcagggcctggtttgccaggtccctcagctccaccctgcttctgggccctgttcaccctccgaactcccaccccagagggcagtgctgccctgcgcctcccccagccccaccctcgggggctccctggcttgcagggtctgtcagggttgtcctgctgcacttcctacgcatggcagcaggtggcactggccgtccgtccatctgcccagtggccttgggagaacggaaccgccctggccgtccagcccagccctgtctccctgccagccgcgcacaggctgtccccggcatgtcccaggagtggagtggcctctgtcagggagaccgcctgtgcgcggggtcccccttaggagcgtccaggtatcacccagggcctgacaacagaggctgggcaggcggggacggttggtggggtctcaggcctgtgcccagctgacaggctcctcgccggcttctcctcagggatgcttgagtacgaaccggccaagaggttctccatccggcagatccggcagcacaggtgagcggcccctgggggcagtggggccgaggctgcagggaggccggccatgtgggcagctggttgagcgggcgctagagcagggcgtggtgggggtgccaggctgggctggggccagaccccgtgcagcgcccgcagttctcggggcccgagtggggtctctgggcagtgtcctgttaccggccagacccaggcgccttgtccgaactggggtctgagtgaggacatgcgtccgtccctgccctaggcatggagatgcgccaggaagggcacagctggtcccaaacactggcgagagcctctctttttcccctcctcctggggctcccagcagcagggtgtggctgggatccagcccagggcccccagctccatgacagggaagacagagcagcggacggggtcagcaggccccacagtgccgcctccctcacttcgtgggctctgctcctctgcaccagcccctggaggcccttgagccgtctgctggagcccctccg

SEQ ID NO: 570 - DNA, 1188 bp, Homo sapiens
gccgtctgctggagcccctccgagccccgaggccacccactgagaccggctctgggagtgggagtgtccggacccctgaggcgctggtgctgattgtgccttgggggtctctgcacagctcgggtcatctgggcgcctggcggggactggggctgccccccgatagcctcctgggctgggatgtgctcagggccccccagacccccttctggcctttgctggctttgcagccagcatccatctggtgggtgctggcttctgagtgccacctgggacacaggcctcagggtggaggggacatctgtcaggcttggagtcaggtcagcctgcctgctcctagaggacatggctgagcttctgtggtcacagccaccccttgcacggcctggtcccagctcctgagtgtgtggcaggtaccctgggcccagaggagctgggtcggaaaactggaccgccctggtgccagcctgacaggcgccactgcttctgggcgtttgcagctggttccggaagaaacatcctccggctgaagcaccagtgcccatcccaccgagcccagacaccaaggaccggtggcgcagcatgactgtggtgccgtacttggaggacctgcacggcgcggacgaggacgaggacctcttcgacatcgaggatgacatcatctacactcaggacttcacggtgcccggtgagtctggcgggggcccctgcccggctctgctgactcggccaggatgtcccacgggagcagggtgcctgcctgtctgcaacaaggacagcttctgccctctggtggccaatcccacgtccccaaagcctccagcccacctgcaggctgcctccgccctgcgggccgctgggacatggctgaaaggtgtggggtcagcgggggcaccagcccaggcctgtctggccaggagggttcctcaggcgtctctccgggtgctgcccagccaggcaccacccaccggccttggcctgagtcccagcaggagcaggcgggggagccccagggtcgggggagggtaggtgagagtcagggtgcagggtggcccctcagacagctggcatgagagagggtccagtggccctccctcccgtcgtccctgaggcctgcccgctggccctgatgccggccgcccttcttccctaggtggcgaggaggcgtctgaggcagggcttagagcg

SEQ ID NO: 571 - DNA, 1210 bp, Homo sapiens
gccctggcaggctgagctctgctccccgcgtggttctgtgctggcatttcgcgtgcctggcctgagcctggcccgagcctggccctcctgtgtcctcacagatgagcatgtggcggctcctgggcctctagaaccaaccatgggccagggtgccccaggggagcacgggagggtcctgccttgtcagcttgcctcctactcgtgaggttcctgcagtcagtacctgggtggggtcccacctgcggccatggcaggtgcaacagacgtggtggaggggacactcctgcccaggccatctgcgggaggctcagccccggggggtgcctcccagagctgctggggggcagcatttcaggctggatacacctgggcctgacccgggggcgggcatggcctgggcagcagctgtaagtgcgtccccgtggtgggggccagccaggtccctgtggctctggggttgcgcccctcagctcaggccacacttgccgtctccctcccaggacaggtcccagaagaggaggccagtcacaatggacagcgccggggcctccccaaggccgtgtgtatgaacggcacagaggcggcgcagctgagcaccaaatccagggcggagggccgggcccccaaccctgcccgcaaggcctgctccgccagcagcaagatccgccggctgtcggcctgcaagcagcagtgaggctggccgcctgcaggtggggcgcggcggggcccgggtggggcatgtggggacaacgcctggatgccacagccagccgtgagcatagcccgcgctagtcagtcatggtgaccgtcacgtggctgcgcgtggttgccatgtggcctttgggtggcttggccacgtagcgatccccgtggagggtgccgtctcggggcctggtgtctggccagcgtgctggtcatggaggcctacgtgtggcggggctctgggggggcgtgccgtcctcacagccacctctcagagtgggtgcattccgaggaccctgccctgggcctggcgccccctccccatgcccgcgccgcttccaggaaaggcttatgctgggctcagcccagaggcttttgagcaccagtgggtggtgggtggtggggaggggccgcggcctccatggctctgccggggtgccgcaggctctgagccagctgccaagtatggctgaggctgagtcgtgccggacgctgccctgtctctccc

SEQ ID NO: 572 - DNA, 1843 bp, Homo sapiens
gccgcaggctctgagccagctgccaagtatggctgaggctgagtcgtgccggacgctgccctgtctctccctgtgtgcctgcctcctctcccagccccagccccagccccgggtgggagacggagtcccagaggtgtcagagacccttaagtcacctgccgaggatgcggggtggatgggggcccgaggctgaagcccctgccttgccacagcccctctcccaggttttgggggccaccgcctgagttacatgtctgtcccccaaatgggtgcccacagcccatccaccagcgtcagagcccgccaggccccactgcaaaaggccacacaatgtaccccgggagtgactcaagggtggccttccctggcctcccctgctgccccccaggagtccggtagccccatgactgtacctcagcttctccatcctcccaggggcccgcgggaggcggagaaccggtgcccaggctgacctcttccgtcttccttccaccctgcagcccgtgtccaggagccccgccaggtgcccgcgccaggccctcagtcttcctgccggttccgcccgccctcccggagaggtggccgccatgcttctgtgccgaccacgccccaggacctccggagcgccctgcagggccgggcagggggacagcagggaccgggcgcagccctcccccctcggccgcccggcagtgcacgcggcttgttgacttcgcagccccgggcggagccttcccgggcgggcgtgggaggagggaggcggcctccatgcactttatgtggagactactggccccgcccgtggcctcgtgctccgcagggcgcccagcgccgtccggcggccccgccgcagaccagctggcgggtgtggagaccaggctcctgaccccgccatgcatgcagcgccacctggaagccgcgcggccgctttggttttttgtttggttggttccattttctttttttctttttttttttaagaaaaaataaaaggtggatttgagctgtggctgtgaggggtgtttgggagctgctgggtggcaggggggctgtggggtcgggctcacgtcgcggccgcctttgcgctctcgggtcaccctgctttggcggcccggccggagggcaggaccctcacctctcccccaaggccactgcgctcttgggaccccagagaaaacccggagcaagcaggagtgtgcggtcaatatttatatcatccagaaaagaaaaacacgagaaacgccatcgcgggatggtgcagacgcggcggggactcggagggtgccgtgcgggcgaggccgcccaaatttggcaataaataaagcttgggaagcttggacctggccgtctgggttttgttcgcgtctcaacgtggatggggcggcagcggggcgggcgccgttgacatgcggagggcagtggggactcggggcgcgggagggccggggccggctccctcagggccggcggcagcagcggtggcggcgcggttattgctcggaggcggcgcgggctgccgccagcacacgccgcagtgaggtaaacggtctcggaggtcggcagtcacggtgttgagccgcctcccggcccagggcggcgaactcgtctgcgaccgttagcgccccgcggcccccgcccgggcgagctcgcgcacgcgcccggcacgcggcggctccatcgggcccagtgggctgcgcgaccctcgggtggcgggccctgcgactaagcggccgccccgtccgggactgagggcgagtgatcgttgtcctcaggagcccgaagctgagagccgttcacgccccttccttcccgcccagccggggtctccgcggcccgcgcctca

SEQ ID NO: 573 - DNA, 1500 bp, Homo sapiens
cccgccgcagaccagctggcgggtgtggagaccaggctcctgaccccgccatgcatgcagcgccacctggaagccgcgcggccgctttggttttttgtttggttggttccattttctttttttctttttttttttaagaaaaaataaaaggtggatttgagctgtggctgtgaggggtgtttgggagctgctgggtggcaggggggctgtggggtcgggctcacgtcgcggccgcctttgcgctctcgggtcaccctgctttggcggcccggccggagggcaggaccctcacctctcccccaaggccactgcgctcttgggaccccagagaaaacccggagcaagcaggagtgtgcggtcaatatttatatcatccagaaaagaaaaacacgagaaacgccatcgcgggatggtgcagacgcggcggggactcggagggtgccgtgcgggcgaggccgcccaaatttggcaataaataaagcttgggaagcttggacctggccgtctgggttttgttcgcgtctcaacgtggatggggcggcagcggggcgggcgccgttgacatgcggagggcagtggggactcggggcgcgggagggccggggccggctccctcagggccggcggcagcagcggtggcggcgcggttattgctcggaggcggcgcgggctgccgccagcacacgccgcagtgaggtaaacggtctcggaggtcggcagtcacggtgttgagccgcctcccggcccagggcggcgaactcgtctgcgaccgttagcgccccgcggcccccgcccgggcgagctcgcgcacgcgcccggcacgcggcggctccatcgggcccagtgggctgcgcgaccctcgggtggcgggccctgcgactaagcggccgccccgtccgggactgagggcgagtgatcgttgtcctcaggagcccgaagctgagagccgttcacgccccttccttcccgcccagccggggtctccgcggcccgcgcctcacgacgcccagcacccggcaagcaccggaaagagcagtgcacacttcggcggcgcgagggcggccggggctctgcgcctgcgccctgaagcggcgagcgcgcctccgtcgcccggcgcgtgcgcgaagggcccgcggtccccgcgcattcgcgtcggggcgtcgcgcccccacgtctctcccgccgccgaggccccgtgcggcgccggagaagctgccagagagatgggcccaggacgcgggacttaggccgggctgtggtcgggggacgtgggggcggcggcgaccaacgcgggagtcgccacgacgggctcggcgaggcgcggcggaaagagtctctcgtcgaggccagccgccagcttgtccagcaccgacccggatggtaggacgcacaggcccgagccggggcaccccccgccgcccggctcctcctcgatgacggggatggcggggtcgtcgccggcgccgcccagggtgcgaccgtcgggcgggccgtccacgc

SEQ ID NO: 574 - DNA, 4593 bp, Homo sapiens
agaggaggaggaagccggaagtgcatcggccccgggtctgtccgggcgttgcgggattggggcctgggaacgctcggcccccggcagccgagaagcccgtgactgggctgagcagcaccatcccagccctggggcctgctgactgcccagtcccggcttcacctgcagcgaacccggagcgttgctatcctccaccggactgtcaggctctgcgcgccccgcggaggtcggcggcgaccagcagcgactgcggagcgacggcgggcggccccgggcatgtacgcccccggaggcgcagggctgcccggcgggcgccggcggaggagcccgggaggcagcgctctgcccaagcagccggagcgtagcctggcctcggccctgcctggcgccctgtctatcacggcgctgtgcactgccctcgccgagcccgcctggttgcacatccacggaggcacctgttcgcgccaggagctgggggtctccgacgtgttgggctatgtgcacccggacctgctgaaagatttctgcatgaatccccagacagtgctgctcctgcgggtcatcgccgccttctgtttcctgggcatcctgtgtagtctctccgctttccttctggatgtctttgggccgaagcatcctgctctgaagatcactcgtcgctatgccttcgcccatatcctaacggttctgcagtgtgccaccgtcattggcttttcttattgggcttctgaactcatcttggcccagcagcagcagcataagaagtaccatggatcccaggtctatgtcaccttcgccgttagcttctacctggtggcaggagctggtggagcctcaatcctggccacggcagccaacctcctgcgccactaccccacagaggaagaggagcaggcgctggagctgctctcagagatggaagagaacgagccctacccggcggaatatgaggtcatcaaccagttccagccaccccctgcttacacaccctaatgccagccctgggctctcttcctcggcagcccctccctcaactctgcagctcctctcgcacccagaggagctcctttccccagcaggcctcactggtaggatcctgaccatcttctccaaaccttccccaggagagactctgcctttagggtcatccaagtatccctgctctcagaaccggaggtccactggttttctataatgtactctttccctcctgccacatcctgcccccttcacattcacgagtcattaccagccagggaaggtcatccaagtttcctccagcatgggcgatatctttgggaccgagactttccttggagagctgctgagagcggacagtcccaaaaacaagtgtcaaagggcccaagggaaaggggactgtgccctggaggctcacttcacagggatcagtgtttgctccacagctgtagctctgggctgacgccccccagaccccttccttctcggagtgacccgcccccaggccacctgctccggggagttctgtgcactttactctttggacttctcctcacgtgtgccctggttttatggggagagggaatcgctgttgggaaggcagagcagttgcaaccctctctgcccttgcttcatgtggctggagcccaggcaaggagagcaggagccagcgtgagactgaggccccctggtgcctatcaaggaccagagtgaaggggactacatctcccagcccttcaccttttaaatatgagtggttttaaaaggaaaaaaatgaaaccaggcaacagcaacaatattctgtttttaaaatagggacaagactgttgtcactttttagacatgtatcccattccttttggctctgcaatatttggggctgtagctccttccaagcccatggtagtccctccccgagtctctcccagtagaatgcagcctcccttccctggccccttccctctcagtgacggtgactccctggggccttctcgtggaacccagaggggctgaggactgtggcctggctggcgggccagcgtggtgctcctcaggactgcagcactgagatggaacctggcctcagtttaggaacaggggccacaacagggcaggaacccaccaccctccacataggaatacaaccagtggggccacatcatgtgaggcatcagacccacactgtcagcccagcaggccgggctgtgtccttcagacccagtgctgccctagactctgactcgggactccagcttgccacgtgccctctcccctcttgaatgtactctggtcttgcagtgtgctgctgggactttcttgctcagccatcactctggtcaccttgtttgctctgggtctggctgaattttctgccctgagatctgggcataaagtggatgaaacttgaaagaccttcagtgtagatccagatggccaacctgtccttgttaagttacttgcttcttgggaatcagtgtcccctgctgagctgaaaaggaaatggattccaatctcttccaacctttaaggtgatagatagtttgagcaagactggagaatggacaacactatgaagctgtggctagaaagggactgtcatgtcccatcctttggccagattgactggggatgtccggacagatgcctgcatgggtggtgagggccacatctgcacacgagccagtggctgcttgcagttcactgctgtgatgccagagtgtgttcaaaggtgactctcctgctcttctggactcttctctcaggcaagaaaggctgcaggctgcctgctatgtgatgcctgagcacaaagccaaggaactgaactaagtctttctgttaagtcctgagtttgtcattggcaggtttacttgtggccagctctctctgcccttgggtgtctgagcaggcagaccagaagaccaggcactggacctgcatgccaaagggactggtcatctcctgaggacctgtaaatgaccctgtggactgttccgcacgatccggaacccactttttattcactccccatgtctttggccttcctcttctttctctttccctctgccatcctgacactgatagtttgtcatataaattccccgggttgtgtttttttttctagaaaaaaattaaaagggaaaacaaaaccaaaaaaaccagaaaccacgaataagaatggaaatgacaatggctgcctgtcatttttctgtcacgattttcctgatttggtttgttccctttgtctcagagaagcaggagatgttgatgaggctgtatttttttttctttttcttgtttttgagacaagagtctcgctctgtcacccgggctggagtgtaacgtggcatgatctcagctcactgcaacctctgcctcctgggttcaagcgattatcctgcctcagcctcctgagtagctgggattacaggcatgcgccactatgcccagataatttttttgtatttttagtagagacagggtttcaccatgttggccaggctggtctggaactcctaacctcaggttatccacccaccttggcctcccaaagtgctgggattataggcatgaaccaccgtgcctggccaaagatgtaatttaaaatagttagaagggacttggcatgggccagctccgtgcatggcattttcacccccagagcttcctaatcctgttttcacacaggaagtttctaggtctttctagaacagctagaaatagtagctgactcccgcccaaggcccaaccttcaaaccctgagctcttcaggctgcatcctctggtgagctatagaggagaacgtggctcctaaactctagccatcctgtgggaggaaatagacttctttgggctgtggcttgcagaacaaactacactttttttccctctattgtttaaattttatttaataatttgtgtgtttttctgtctttattttctgtatttcacgtgttccttcactccctagaaactgcactttctttgaaaccataggtaatgaatcttactaggagaggcatggggatagagacagttctgggagtgtgacctgtaagcctcctgtagggcagtgccaggccttgattgcccacgttctctccgttccttcttccttcatacatttgatcacacagcctacacccagccccgagtgtgcatcacggtaaaagagctgagggctctcttcagggagcagcccatttaggtctcttttgttgttgttagggagaatacacatctttcttggaagctgggagtgtgttctcatttcatgtccattcagacaaagcaccattaggcaccatgaaatatacagtgacggacaggaccctgtctgcaaggattttatgtccttagttcaggagatggacttgtccacagaaaggcagagtgaagtgggcggccggctcggaaaagtcctgtgcccagaagggagccagttctgacctgagtgataatgaaaggcttcctggaggacgcagcttgagccacacttgatgtgggagtgaactgggatagggacactcctgctgagagaatggcaagagcaaaagcacactggtggccaggaggtggtaagagccgaggttagaaaggtgaggggtgctcatttaa

SEQ ID NO: 575 - DNA, 4570 bp, Homo sapiens
agaggaggaggaagccggaagtgcatcggccccgggtctgtccgggcgttgcgggattggggcctgggaacgctcggcccccggcagccgagaagcccgtgactgggctgagcagcaccatcccagccctggggcctgctgactgcgaacccggagcgttgctatcctccaccggactgtcaggctctgcgcgccccgcggaggtcggcggcgaccagcagcgactgcggagcgacggcgggcggccccgggcatgtacgcccccggaggcgcagggctgcccggcgggcgccggcggaggagcccgggaggcagcgctctgcccaagcagccggagcgtagcctggcctcggccctgcctggcgccctgtctatcacggcgctgtgcactgccctcgccgagcccgcctggttgcacatccacggaggcacctgttcgcgccaggagctgggggtctccgacgtgttgggctatgtgcacccggacctgctgaaagatttctgcatgaatccccagacagtgctgctcctgcgggtcatcgccgccttctgtttcctgggcatcctgtgtagtctctccgctttccttctggatgtctttgggccgaagcatcctgctctgaagatcactcgtcgctatgccttcgcccatatcctaacggttctgcagtgtgccaccgtcattggcttttcttattgggcttctgaactcatcttggcccagcagcagcagcataagaagtaccatggatcccaggtctatgtcaccttcgccgttagcttctacctggtggcaggagctggtggagcctcaatcctggccacggcagccaacctcctgcgccactaccccacagaggaagaggagcaggcgctggagctgctctcagagatggaagagaacgagccctacccggcggaatatgaggtcatcaaccagttccagccaccccctgcttacacaccctaatgccagccctgggctctcttcctcggcagcccctccctcaactctgcagctcctctcgcacccagaggagctcctttccccagcaggcctcactggtaggatcctgaccatcttctccaaaccttccccaggagagactctgcctttagggtcatccaagtatccctgctctcagaaccggaggtccactggttttctataatgtactctttccctcctgccacatcctgcccccttcacattcacgagtcattaccagccagggaaggtcatccaagtttcctccagcatgggcgatatctttgggaccgagactttccttggagagctgctgagagcggacagtcccaaaaacaagtgtcaaagggcccaagggaaaggggactgtgccctggaggctcacttcacagggatcagtgtttgctccacagctgtagctctgggctgacgccccccagaccccttccttctcggagtgacccgcccccaggccacctgctccggggagttctgtgcactttactctttggacttctcctcacgtgtgccctggttttatggggagagggaatcgctgttgggaaggcagagcagttgcaaccctctctgcccttgcttcatgtggctggagcccaggcaaggagagcaggagccagcgtgagactgaggccccctggtgcctatcaaggaccagagtgaaggggactacatctcccagcccttcaccttttaaatatgagtggttttaaaaggaaaaaaatgaaaccaggcaacagcaacaatattctgtttttaaaatagggacaagactgttgtcactttttagacatgtatcccattccttttggctctgcaatatttggggctgtagctccttccaagcccatggtagtccctccccgagtctctcccagtagaatgcagcctcccttccctggccccttccctctcagtgacggtgactccctggggccttctcgtggaacccagaggggctgaggactgtggcctggctggcgggccagcgtggtgctcctcaggactgcagcactgagatggaacctggcctcagtttaggaacaggggccacaacagggcaggaacccaccaccctccacataggaatacaaccagtggggccacatcatgtgaggcatcagacccacactgtcagcccagcaggccgggctgtgtccttcagacccagtgctgccctagactctgactcgggactccagcttgccacgtgccctctcccctcttgaatgtactctggtcttgcagtgtgctgctgggactttcttgctcagccatcactctggtcaccttgtttgctctgggtctggctgaattttctgccctgagatctgggcataaagtggatgaaacttgaaagaccttcagtgtagatccagatggccaacctgtccttgttaagttacttgcttcttgggaatcagtgtcccctgctgagctgaaaaggaaatggattccaatctcttccaacctttaaggtgatagatagtttgagcaagactggagaatggacaacactatgaagctgtggctagaaagggactgtcatgtcccatcctttggccagattgactggggatgtccggacagatgcctgcatgggtggtgagggccacatctgcacacgagccagtggctgcttgcagttcactgctgtgatgccagagtgtgttcaaaggtgactctcctgctcttctggactcttctctcaggcaagaaaggctgcaggctgcctgctatgtgatgcctgagcacaaagccaaggaactgaactaagtctttctgttaagtcctgagtttgtcattggcaggtttacttgtggccagctctctctgcccttgggtgtctgagcaggcagaccagaagaccaggcactggacctgcatgccaaagggactggtcatctcctgaggacctgtaaatgaccctgtggactgttccgcacgatccggaacccactttttattcactccccatgtctttggccttcctcttctttctctttccctctgccatcctgacactgatagtttgtcatataaattccccgggttgtgtttttttttctagaaaaaaattaaaagggaaaacaaaaccaaaaaaaccagaaaccacgaataagaatggaaatgacaatggctgcctgtcatttttctgtcacgattttcctgatttggtttgttccctttgtctcagagaagcaggagatgttgatgaggctgtatttttttttctttttcttgtttttgagacaagagtctcgctctgtcacccgggctggagtgtaacgtggcatgatctcagctcactgcaacctctgcctcctgggttcaagcgattatcctgcctcagcctcctgagtagctgggattacaggcatgcgccactatgcccagataatttttttgtatttttagtagagacagggtttcaccatgttggccaggctggtctggaactcctaacctcaggttatccacccaccttggcctcccaaagtgctgggattataggcatgaaccaccgtgcctggccaaagatgtaatttaaaatagttagaagggacttggcatgggccagctccgtgcatggcattttcacccccagagcttcctaatcctgttttcacacaggaagtttctaggtctttctagaacagctagaaatagtagctgactcccgcccaaggcccaaccttcaaaccctgagctcttcaggctgcatcctctggtgagctatagaggagaacgtggctcctaaactctagccatcctgtgggaggaaatagacttctttgggctgtggcttgcagaacaaactacactttttttccctctattgtttaaattttatttaataatttgtgtgtttttctgtctttattttctgtatttcacgtgttccttcactccctagaaactgcactttctttgaaaccataggtaatgaatcttactaggagaggcatggggatagagacagttctgggagtgtgacctgtaagcctcctgtagggcagtgccaggccttgattgcccacgttctctccgttccttcttccttcatacatttgatcacacagcctacacccagccccgagtgtgcatcacggtaaaagagctgagggctctcttcagggagcagcccatttaggtctcttttgttgttgttagggagaatacacatctttcttggaagctgggagtgtgttctcatttcatgtccattcagacaaagcaccattaggcaccatgaaatatacagtgacggacaggaccctgtctgcaaggattttatgtccttagttcaggagatggacttgtccacagaaaggcagagtgaagtgggcggccggctcggaaaagtcctgtgcccagaagggagccagttctgacctgagtgataatgaaaggcttcctggaggacgcagcttgagccacacttgatgtgggagtgaactgggatagggacactcctgctgagagaatggcaagagcaaaagcacactggtggccaggaggtggtaagagccgaggttagaaaggtgaggggtgctcatttaa

SEQ ID NO: 576 - DNA, 2586 bp, Homo sapiens
gattggggttttcccctcccatgtgctcaagactggcgctaaaagttttgagcttctcaaaagtctagagccaccgtccagggagcaggtagctgctgggctccggggacactttgcgttcgggctgggagcgtgctttccacgacggtgacacgcttccctggattggcagccagactgccttccgggtcactgccatggaggagccgcagtcagatcctagcgtcgagccccctctgagtcaggaaacattttcagacctatggaaactacttcctgaaaacaacgttctgtcccccttgccgtcccaagcaatggatgatttgatgctgtccccggacgatattgaacaatggttcactgaagacccaggtccagatgaagctcccagaatgccagaggctgctccccccgtggcccctgcaccagcagctcctacaccggcggcccctgcaccagccccctcctggcccctgtcatcttctgtcccttcccagaaaacctaccagggcagctacggtttccgtctgggcttcttgcattctgggacagccaagtctgtgacttgcacgtactcccctgccctcaacaagatgttttgccaactggccaagacctgccctgtgcagctgtgggttgattccacacccccgcccggcacccgcgtccgcgccatggccatctacaagcagtcacagcacatgacggaggttgtgaggcgctgcccccaccatgagcgctgctcagatagcgatggtctggcccctcctcagcatcttatccgagtggaaggaaatttgcgtgtggagtatttggatgacagaaacacttttcgacatagtgtggtggtgccctatgagccgcctgaggttggctctgactgtaccaccatccactacaactacatgtgtaacagttcctgcatgggcggcatgaaccggaggcccatcctcaccatcatcacactggaagactccagtggtaatctactgggacggaacagctttgaggtgcgtgtttgtgcctgtcctgggagagaccggcgcacagaggaagagaatctccgcaagaaaggggagcctcaccacgagctgcccccagggagcactaagcgagcactgcccaacaacaccagctcctctccccagccaaagaagaaaccactggatggagaatatttcacccttcagatccgtgggcgtgagcgcttcgagatgttccgagagctgaatgaggccttggaactcaaggatgcccaggctgggaaggagccaggggggagcagggctcactccagccacctgaagtccaaaaagggtcagtctacctcccgccataaaaaactcatgttcaagacagaagggcctgactcagactgacattctccacttcttgttccccactgacagcctcccacccccatctctccctcccctgccattttgggttttgggtctttgaacccttgcttgcaataggtgtgcgtcagaagcacccaggacttccatttgctttgtcccggggctccactgaacaagttggcctgcactggtgttttgttgtggggaggaggatggggagtaggacataccagcttagattttaaggtttttactgtgagggatgtttgggagatgtaagaaatgttcttgcagttaagggttagtttacaatcagccacattctaggtaggggcccacttcaccgtactaaccagggaagctgtccctcactgttgaattttctctaacttcaaggcccatatctgtgaaatgctggcatttgcacctacctcacagagtgcattgtgagggttaatgaaataatgtacatctggccttgaaaccaccttttattacatggggtctagaacttgacccccttgagggtgcttgttccctctccctgttggtcggtgggttggtagtttctacagttgggcagctggttaggtagagggagttgtcaagtctctgctggcccagccaaaccctgtctgacaacctcttggtgaaccttagtacctaaaaggaaatctcaccccatcccacaccctggaggatttcatctcttgtatatgatgatctggatccaccaagacttgttttatgctcagggtcaatttcttttttcttttttttttttttttttctttttctttgagactgggtctcgctttgttgcccaggctggagtggagtggcgtgatcttggcttactgcagcctttgcctccccggctcgagcagtcctgcctcagcctccggagtagctgggaccacaggttcatgccaccatggccagccaacttttgcatgttttgtagagatggggtctcacagtgttgcccaggctggtctcaaactcctgggctcaggcgatccacctgtctcagcctcccagagtgctgggattacaattgtgagccaccacgtccagctggaagggtcaacatcttttacattctgcaagcacatctgcattttcaccccacccttcccctccttctccctttttatatcccatttttatatcgatctcttattttacaataaaactttgctgccacctgtgtgtctgaggggtg

SEQ ID NO: 577 - DNA, 2588 bp, Homo sapiens
gatgggattggggttttcccctcccatgtgctcaagactggcgctaaaagttttgagcttctcaaaagtctagagccaccgtccagggagcaggtagctgctgggctccggggacactttgcgttcgggctgggagcgtgctttccacgacggtgacacgcttccctggattggccagactgccttccgggtcactgccatggaggagccgcagtcagatcctagcgtcgagccccctctgagtcaggaaacattttcagacctatggaaactacttcctgaaaacaacgttctgtcccccttgccgtcccaagcaatggatgatttgatgctgtccccggacgatattgaacaatggttcactgaagacccaggtccagatgaagctcccagaatgccagaggctgctccccccgtggcccctgcaccagcagctcctacaccggcggcccctgcaccagccccctcctggcccctgtcatcttctgtcccttcccagaaaacctaccagggcagctacggtttccgtctgggcttcttgcattctgggacagccaagtctgtgacttgcacgtactcccctgccctcaacaagatgttttgccaactggccaagacctgccctgtgcagctgtgggttgattccacacccccgcccggcacccgcgtccgcgccatggccatctacaagcagtcacagcacatgacggaggttgtgaggcgctgcccccaccatgagcgctgctcagatagcgatggtctggcccctcctcagcatcttatccgagtggaaggaaatttgcgtgtggagtatttggatgacagaaacacttttcgacatagtgtggtggtgccctatgagccgcctgaggttggctctgactgtaccaccatccactacaactacatgtgtaacagttcctgcatgggcggcatgaaccggaggcccatcctcaccatcatcacactggaagactccagtggtaatctactgggacggaacagctttgaggtgcgtgtttgtgcctgtcctgggagagaccggcgcacagaggaagagaatctccgcaagaaaggggagcctcaccacgagctgcccccagggagcactaagcgagcactgcccaacaacaccagctcctctccccagccaaagaagaaaccactggatggagaatatttcacccttcagatccgtgggcgtgagcgcttcgagatgttccgagagctgaatgaggccttggaactcaaggatgcccaggctgggaaggagccaggggggagcagggctcactccagccacctgaagtccaaaaagggtcagtctacctcccgccataaaaaactcatgttcaagacagaagggcctgactcagactgacattctccacttcttgttccccactgacagcctcccacccccatctctccctcccctgccattttgggttttgggtctttgaacccttgcttgcaataggtgtgcgtcagaagcacccaggacttccatttgctttgtcccggggctccactgaacaagttggcctgcactggtgttttgttgtggggaggaggatggggagtaggacataccagcttagattttaaggtttttactgtgagggatgtttgggagatgtaagaaatgttcttgcagttaagggttagtttacaatcagccacattctaggtaggggcccacttcaccgtactaaccagggaagctgtccctcactgttgaattttctctaacttcaaggcccatatctgtgaaatgctggcatttgcacctacctcacagagtgcattgtgagggttaatgaaataatgtacatctggccttgaaaccaccttttattacatggggtctagaacttgacccccttgagggtgcttgttccctctccctgttggtcggtgggttggtagtttctacagttgggcagctggttaggtagagggagttgtcaagtctctgctggcccagccaaaccctgtctgacaacctcttggtgaaccttagtacctaaaaggaaatctcaccccatcccacaccctggaggatttcatctcttgtatatgatgatctggatccaccaagacttgttttatgctcagggtcaatttcttttttcttttttttttttttttttctttttctttgagactgggtctcgctttgttgcccaggctggagtggagtggcgtgatcttggcttactgcagcctttgcctccccggctcgagcagtcctgcctcagcctccggagtagctgggaccacaggttcatgccaccatggccagccaacttttgcatgttttgtagagatggggtctcacagtgttgcccaggctggtctcaaactcctgggctcaggcgatccacctgtctcagcctcccagagtgctgggattacaattgtgagccaccacgtccagctggaagggtcaacatcttttacattctgcaagcacatctgcattttcaccccacccttcccctccttctccctttttatatcccatttttatatcgatctcttattttacaataaaactttgctgccacctgtgtgtctgaggggtg

SEQ ID NO: 578 - DNA, 2719 bp, Homo sapiens
gattggggttttcccctcccatgtgctcaagactggcgctaaaagttttgagcttctcaaaagtctagagccaccgtccagggagcaggtagctgctgggctccggggacactttgcgttcgggctgggagcgtgctttccacgacggtgacacgcttccctggattggcagccagactgccttccgggtcactgccatggaggagccgcagtcagatcctagcgtcgagccccctctgagtcaggaaacattttcagacctatggaaactacttcctgaaaacaacgttctgtcccccttgccgtcccaagcaatggatgatttgatgctgtccccggacgatattgaacaatggttcactgaagacccaggtccagatgaagctcccagaatgccagaggctgctccccccgtggcccctgcaccagcagctcctacaccggcggcccctgcaccagccccctcctggcccctgtcatcttctgtcccttcccagaaaacctaccagggcagctacggtttccgtctgggcttcttgcattctgggacagccaagtctgtgacttgcacgtactcccctgccctcaacaagatgttttgccaactggccaagacctgccctgtgcagctgtgggttgattccacacccccgcccggcacccgcgtccgcgccatggccatctacaagcagtcacagcacatgacggaggttgtgaggcgctgcccccaccatgagcgctgctcagatagcgatggtctggcccctcctcagcatcttatccgagtggaaggaaatttgcgtgtggagtatttggatgacagaaacacttttcgacatagtgtggtggtgccctatgagccgcctgaggttggctctgactgtaccaccatccactacaactacatgtgtaacagttcctgcatgggcggcatgaaccggaggcccatcctcaccatcatcacactggaagactccagtggtaatctactgggacggaacagctttgaggtgcgtgtttgtgcctgtcctgggagagaccggcgcacagaggaagagaatctccgcaagaaaggggagcctcaccacgagctgcccccagggagcactaagcgagcactgcccaacaacaccagctcctctccccagccaaagaagaaaccactggatggagaatatttcacccttcaggaccagaccagctttcaaaaagaaaattgttaaagagagcatgaaaatggttctatgactttgcctgatacagatgctacttgacttacgatggtgttacttcctgataaactcgtcgtaagttgaaaatattatccgtgggcgtgagcgcttcgagatgttccgagagctgaatgaggccttggaactcaaggatgcccaggctgggaaggagccaggggggagcagggctcactccagccacctgaagtccaaaaagggtcagtctacctcccgccataaaaaactcatgttcaagacagaagggcctgactcagactgacattctccacttcttgttccccactgacagcctcccacccccatctctccctcccctgccattttgggttttgggtctttgaacccttgcttgcaataggtgtgcgtcagaagcacccaggacttccatttgctttgtcccggggctccactgaacaagttggcctgcactggtgttttgttgtggggaggaggatggggagtaggacataccagcttagattttaaggtttttactgtgagggatgtttgggagatgtaagaaatgttcttgcagttaagggttagtttacaatcagccacattctaggtaggggcccacttcaccgtactaaccagggaagctgtccctcactgttgaattttctctaacttcaaggcccatatctgtgaaatgctggcatttgcacctacctcacagagtgcattgtgagggttaatgaaataatgtacatctggccttgaaaccaccttttattacatggggtctagaacttgacccccttgagggtgcttgttccctctccctgttggtcggtgggttggtagtttctacagttgggcagctggttaggtagagggagttgtcaagtctctgctggcccagccaaaccctgtctgacaacctcttggtgaaccttagtacctaaaaggaaatctcaccccatcccacaccctggaggatttcatctcttgtatatgatgatctggatccaccaagacttgttttatgctcagggtcaatttcttttttcttttttttttttttttttctttttctttgagactgggtctcgctttgttgcccaggctggagtggagtggcgtgatcttggcttactgcagcctttgcctccccggctcgagcagtcctgcctcagcctccggagtagctgggaccacaggttcatgccaccatggccagccaacttttgcatgttttgtagagatggggtctcacagtgttgcccaggctggtctcaaactcctgggctcaggcgatccacctgtctcagcctcccagagtgctgggattacaattgtgagccaccacgtccagctggaagggtcaacatcttttacattctgcaagcacatctgcattttcaccccacccttcccctccttctccctttttatatcccatttttatatcgatctcttattttacaataaaactttgctgccacctgtgtgtctgaggggtg

SEQ ID NO: 579 - DNA, 2646 bp, Homo sapiens
gattggggttttcccctcccatgtgctcaagactggcgctaaaagttttgagcttctcaaaagtctagagccaccgtccagggagcaggtagctgctgggctccggggacactttgcgttcgggctgggagcgtgctttccacgacggtgacacgcttccctggattggcagccagactgccttccgggtcactgccatggaggagccgcagtcagatcctagcgtcgagccccctctgagtcaggaaacattttcagacctatggaaactacttcctgaaaacaacgttctgtcccccttgccgtcccaagcaatggatgatttgatgctgtccccggacgatattgaacaatggttcactgaagacccaggtccagatgaagctcccagaatgccagaggctgctccccccgtggcccctgcaccagcagctcctacaccggcggcccctgcaccagccccctcctggcccctgtcatcttctgtcccttcccagaaaacctaccagggcagctacggtttccgtctgggcttcttgcattctgggacagccaagtctgtgacttgcacgtactcccctgccctcaacaagatgttttgccaactggccaagacctgccctgtgcagctgtgggttgattccacacccccgcccggcacccgcgtccgcgccatggccatctacaagcagtcacagcacatgacggaggttgtgaggcgctgcccccaccatgagcgctgctcagatagcgatggtctggcccctcctcagcatcttatccgagtggaaggaaatttgcgtgtggagtatttggatgacagaaacacttttcgacatagtgtggtggtgccctatgagccgcctgaggttggctctgactgtaccaccatccactacaactacatgtgtaacagttcctgcatgggcggcatgaaccggaggcccatcctcaccatcatcacactggaagactccagtggtaatctactgggacggaacagctttgaggtgcgtgtttgtgcctgtcctgggagagaccggcgcacagaggaagagaatctccgcaagaaaggggagcctcaccacgagctgcccccagggagcactaagcgagcactgcccaacaacaccagctcctctccccagccaaagaagaaaccactggatggagaatatttcacccttcagatgctacttgacttacgatggtgttacttcctgataaactcgtcgtaagttgaaaatattatccgtgggcgtgagcgcttcgagatgttccgagagctgaatgaggccttggaactcaaggatgcccaggctgggaaggagccaggggggagcagggctcactccagccacctgaagtccaaaaagggtcagtctacctcccgccataaaaaactcatgttcaagacagaagggcctgactcagactgacattctccacttcttgttccccactgacagcctcccacccccatctctccctcccctgccattttgggttttgggtctttgaacccttgcttgcaataggtgtgcgtcagaagcacccaggacttccatttgctttgtcccggggctccactgaacaagttggcctgcactggtgttttgttgtggggaggaggatggggagtaggacataccagcttagattttaaggtttttactgtgagggatgtttgggagatgtaagaaatgttcttgcagttaagggttagtttacaatcagccacattctaggtaggggcccacttcaccgtactaaccagggaagctgtccctcactgttgaattttctctaacttcaaggcccatatctgtgaaatgctggcatttgcacctacctcacagagtgcattgtgagggttaatgaaataatgtacatctggccttgaaaccaccttttattacatggggtctagaacttgacccccttgagggtgcttgttccctctccctgttggtcggtgggttggtagtttctacagttgggcagctggttaggtagagggagttgtcaagtctctgctggcccagccaaaccctgtctgacaacctcttggtgaaccttagtacctaaaaggaaatctcaccccatcccacaccctggaggatttcatctcttgtatatgatgatctggatccaccaagacttgttttatgctcagggtcaatttcttttttcttttttttttttttttttctttttctttgagactgggtctcgctttgttgcccaggctggagtggagtggcgtgatcttggcttactgcagcctttgcctccccggctcgagcagtcctgcctcagcctccggagtagctgggaccacaggttcatgccaccatggccagccaacttttgcatgttttgtagagatggggtctcacagtgttgcccaggctggtctcaaactcctgggctcaggcgatccacctgtctcagcctcccagagtgctgggattacaattgtgagccaccacgtccagctggaagggtcaacatcttttacattctgcaagcacatctgcattttcaccccacccttcccctccttctccctttttatatcccatttttatatcgatctcttattttacaataaaactttgctgccacctgtgtgtctgaggggtg

SEQ ID NO: 580 - DNA, 2271 bp, Homo sapiens
tgaggccaggagatggaggctgcagtgagctgtgatcacaccactgtgctccagcctgagtgacagagcaagaccctatctcaaaaaaaaaaaaaaaaaagaaaagctcctgaggtgtagacgccaactctctctagctcgctagtgggttgcaggaggtgcttacgcatgtttgtttctttgctgccgtcttccagttgctttatctgttcacttgtgccctgactttcaactctgtctccttcctcttcctacagtactcccctgccctcaacaagatgttttgccaactggccaagacctgccctgtgcagctgtgggttgattccacacccccgcccggcacccgcgtccgcgccatggccatctacaagcagtcacagcacatgacggaggttgtgaggcgctgcccccaccatgagcgctgctcagatagcgatggtctggcccctcctcagcatcttatccgagtggaaggaaatttgcgtgtggagtatttggatgacagaaacacttttcgacatagtgtggtggtgccctatgagccgcctgaggttggctctgactgtaccaccatccactacaactacatgtgtaacagttcctgcatgggcggcatgaaccggaggcccatcctcaccatcatcacactggaagactccagtggtaatctactgggacggaacagctttgaggtgcgtgtttgtgcctgtcctgggagagaccggcgcacagaggaagagaatctccgcaagaaaggggagcctcaccacgagctgcccccagggagcactaagcgagcactgcccaacaacaccagctcctctccccagccaaagaagaaaccactggatggagaatatttcacccttcagatccgtgggcgtgagcgcttcgagatgttccgagagctgaatgaggccttggaactcaaggatgcccaggctgggaaggagccaggggggagcagggctcactccagccacctgaagtccaaaaagggtcagtctacctcccgccataaaaaactcatgttcaagacagaagggcctgactcagactgacattctccacttcttgttccccactgacagcctcccacccccatctctccctcccctgccattttgggttttgggtctttgaacccttgcttgcaataggtgtgcgtcagaagcacccaggacttccatttgctttgtcccggggctccactgaacaagttggcctgcactggtgttttgttgtggggaggaggatggggagtaggacataccagcttagattttaaggtttttactgtgagggatgtttgggagatgtaagaaatgttcttgcagttaagggttagtttacaatcagccacattctaggtaggggcccacttcaccgtactaaccagggaagctgtccctcactgttgaattttctctaacttcaaggcccatatctgtgaaatgctggcatttgcacctacctcacagagtgcattgtgagggttaatgaaataatgtacatctggccttgaaaccaccttttattacatggggtctagaacttgacccccttgagggtgcttgttccctctccctgttggtcggtgggttggtagtttctacagttgggcagctggttaggtagagggagttgtcaagtctctgctggcccagccaaaccctgtctgacaacctcttggtgaaccttagtacctaaaaggaaatctcaccccatcccacaccctggaggatttcatctcttgtatatgatgatctggatccaccaagacttgttttatgctcagggtcaatttcttttttcttttttttttttttttttctttttctttgagactgggtctcgctttgttgcccaggctggagtggagtggcgtgatcttggcttactgcagcctttgcctccccggctcgagcagtcctgcctcagcctccggagtagctgggaccacaggttcatgccaccatggccagccaacttttgcatgttttgtagagatggggtctcacagtgttgcccaggctggtctcaaactcctgggctcaggcgatccacctgtctcagcctcccagagtgctgggattacaattgtgagccaccacgtccagctggaagggtcaacatcttttacattctgcaagcacatctgcattttcaccccacccttcccctccttctccctttttatatcccatttttatatcgatctcttattttacaataaaactttgctgccacctgtgtgtctgaggggtg

SEQ ID NO: 581 - DNA, 2404 bp, Homo sapiens
tgaggccaggagatggaggctgcagtgagctgtgatcacaccactgtgctccagcctgagtgacagagcaagaccctatctcaaaaaaaaaaaaaaaaaagaaaagctcctgaggtgtagacgccaactctctctagctcgctagtgggttgcaggaggtgcttacgcatgtttgtttctttgctgccgtcttccagttgctttatctgttcacttgtgccctgactttcaactctgtctccttcctcttcctacagtactcccctgccctcaacaagatgttttgccaactggccaagacctgccctgtgcagctgtgggttgattccacacccccgcccggcacccgcgtccgcgccatggccatctacaagcagtcacagcacatgacggaggttgtgaggcgctgcccccaccatgagcgctgctcagatagcgatggtctggcccctcctcagcatcttatccgagtggaaggaaatttgcgtgtggagtatttggatgacagaaacacttttcgacatagtgtggtggtgccctatgagccgcctgaggttggctctgactgtaccaccatccactacaactacatgtgtaacagttcctgcatgggcggcatgaaccggaggcccatcctcaccatcatcacactggaagactccagtggtaatctactgggacggaacagctttgaggtgcgtgtttgtgcctgtcctgggagagaccggcgcacagaggaagagaatctccgcaagaaaggggagcctcaccacgagctgcccccagggagcactaagcgagcactgcccaacaacaccagctcctctccccagccaaagaagaaaccactggatggagaatatttcacccttcaggaccagaccagctttcaaaaagaaaattgttaaagagagcatgaaaatggttctatgactttgcctgatacagatgctacttgacttacgatggtgttacttcctgataaactcgtcgtaagttgaaaatattatccgtgggcgtgagcgcttcgagatgttccgagagctgaatgaggccttggaactcaaggatgcccaggctgggaaggagccaggggggagcagggctcactccagccacctgaagtccaaaaagggtcagtctacctcccgccataaaaaactcatgttcaagacagaagggcctgactcagactgacattctccacttcttgttccccactgacagcctcccacccccatctctccctcccctgccattttgggttttgggtctttgaacccttgcttgcaataggtgtgcgtcagaagcacccaggacttccatttgctttgtcccggggctccactgaacaagttggcctgcactggtgttttgttgtggggaggaggatggggagtaggacataccagcttagattttaaggtttttactgtgagggatgtttgggagatgtaagaaatgttcttgcagttaagggttagtttacaatcagccacattctaggtaggggcccacttcaccgtactaaccagggaagctgtccctcactgttgaattttctctaacttcaaggcccatatctgtgaaatgctggcatttgcacctacctcacagagtgcattgtgagggttaatgaaataatgtacatctggccttgaaaccaccttttattacatggggtctagaacttgacccccttgagggtgcttgttccctctccctgttggtcggtgggttggtagtttctacagttgggcagctggttaggtagagggagttgtcaagtctctgctggcccagccaaaccctgtctgacaacctcttggtgaaccttagtacctaaaaggaaatctcaccccatcccacaccctggaggatttcatctcttgtatatgatgatctggatccaccaagacttgttttatgctcagggtcaatttcttttttcttttttttttttttttttctttttctttgagactgggtctcgctttgttgcccaggctggagtggagtggcgtgatcttggcttactgcagcctttgcctccccggctcgagcagtcctgcctcagcctccggagtagctgggaccacaggttcatgccaccatggccagccaacttttgcatgttttgtagagatggggtctcacagtgttgcccaggctggtctcaaactcctgggctcaggcgatccacctgtctcagcctcccagagtgctgggattacaattgtgagccaccacgtccagctggaagggtcaacatcttttacattctgcaagcacatctgcattttcaccccacccttcccctccttctccctttttatatcccatttttatatcgatctcttattttacaataaaactttgctgccacctgtgtgtctgaggggtg

SEQ ID NO: 582 - DNA, 2331 bp, Homo sapiens
tgaggccaggagatggaggctgcagtgagctgtgatcacaccactgtgctccagcctgagtgacagagcaagaccctatctcaaaaaaaaaaaaaaaaaagaaaagctcctgaggtgtagacgccaactctctctagctcgctagtgggttgcaggaggtgcttacgcatgtttgtttctttgctgccgtcttccagttgctttatctgttcacttgtgccctgactttcaactctgtctccttcctcttcctacagtactcccctgccctcaacaagatgttttgccaactggccaagacctgccctgtgcagctgtgggttgattccacacccccgcccggcacccgcgtccgcgccatggccatctacaagcagtcacagcacatgacggaggttgtgaggcgctgcccccaccatgagcgctgctcagatagcgatggtctggcccctcctcagcatcttatccgagtggaaggaaatttgcgtgtggagtatttggatgacagaaacacttttcgacatagtgtggtggtgccctatgagccgcctgaggttggctctgactgtaccaccatccactacaactacatgtgtaacagttcctgcatgggcggcatgaaccggaggcccatcctcaccatcatcacactggaagactccagtggtaatctactgggacggaacagctttgaggtgcgtgtttgtgcctgtcctgggagagaccggcgcacagaggaagagaatctccgcaagaaaggggagcctcaccacgagctgcccccagggagcactaagcgagcactgcccaacaacaccagctcctctccccagccaaagaagaaaccactggatggagaatatttcacccttcagatgctacttgacttacgatggtgttacttcctgataaactcgtcgtaagttgaaaatattatccgtgggcgtgagcgcttcgagatgttccgagagctgaatgaggccttggaactcaaggatgcccaggctgggaaggagccaggggggagcagggctcactccagccacctgaagtccaaaaagggtcagtctacctcccgccataaaaaactcatgttcaagacagaagggcctgactcagactgacattctccacttcttgttccccactgacagcctcccacccccatctctccctcccctgccattttgggttttgggtctttgaacccttgcttgcaataggtgtgcgtcagaagcacccaggacttccatttgctttgtcccggggctccactgaacaagttggcctgcactggtgttttgttgtggggaggaggatggggagtaggacataccagcttagattttaaggtttttactgtgagggatgtttgggagatgtaagaaatgttcttgcagttaagggttagtttacaatcagccacattctaggtaggggcccacttcaccgtactaaccagggaagctgtccctcactgttgaattttctctaacttcaaggcccatatctgtgaaatgctggcatttgcacctacctcacagagtgcattgtgagggttaatgaaataatgtacatctggccttgaaaccaccttttattacatggggtctagaacttgacccccttgagggtgcttgttccctctccctgttggtcggtgggttggtagtttctacagttgggcagctggttaggtagagggagttgtcaagtctctgctggcccagccaaaccctgtctgacaacctcttggtgaaccttagtacctaaaaggaaatctcaccccatcccacaccctggaggatttcatctcttgtatatgatgatctggatccaccaagacttgttttatgctcagggtcaatttcttttttcttttttttttttttttttctttttctttgagactgggtctcgctttgttgcccaggctggagtggagtggcgtgatcttggcttactgcagcctttgcctccccggctcgagcagtcctgcctcagcctccggagtagctgggaccacaggttcatgccaccatggccagccaacttttgcatgttttgtagagatggggtctcacagtgttgcccaggctggtctcaaactcctgggctcaggcgatccacctgtctcagcctcccagagtgctgggattacaattgtgagccaccacgtccagctggaagggtcaacatcttttacattctgcaagcacatctgcattttcaccccacccttcccctccttctccctttttatatcccatttttatatcgatctcttattttacaataaaactttgctgccacctgtgtgtctgaggggtg

SEQ ID NO: 583 - DNA, 1500 bp, Homo sapiens
tcctcttctgggagtaggcagaagactcccgggaggagaggcgaacagcggacgccaattcttttgaaagcactgtgttccttagcaccgcgggtcgctacgggcctcttgctgtcgcgggatttcggtccaccttccgattgggccgccgcatcccggatcagatttcgcgggcgacccacggaacccgcggagccgggacgtgaaaggttagaaggtttcccgttcccatcaagccctagggctcctcgtggctgctgggagttgtagtctgaacgcttctatcttggcgagaagcgcctacgctccccctaccgagtcccgcggtaattcttaaagcacctgcaccgcccccccgccgcctgcagagggcgcagcaggtcttgcacctcttctgcatctcattctccaggcttcagacctgtctccctcattcaaaaaatatttattatcgagctcttacttgctacccagcactgatataggcactcaggaatacaacaatgaataagatagtagaaaaattctatatcctcataaggcttacgtttccatgtactgaaagcaatgaacaaataaatcttatcagagtgataagggttgtgaaggagattaaataagatggtgtgatataaagtatctgggagaaaacgttagggtgtgatattacggaaagccttcctaaaaaatgacattttaactgatgagaagaaaggatccagctgagagcaaacgcaaaagctttcttccttccacccttcatatttgacacaatgcaggattcctccaaaatgatttccaccaattctgccctcacagctctggcttgcagaattttccaccccaaaatgttagtatctacggcaccaggtcggcgagaatcctgactctgcaccctcctccccaactccatttcctttgcttcctccggcaggcggattacttgcccttacttgtcatggcgactgtccagctttgtgccaggagcctcgcaggggttgatgggattggggttttcccctcccatgtgctcaagactggcgctaaaagttttgagcttctcaaaagtctagagccaccgtccagggagcaggtagctgctgggctccggggacactttgcgttcgggctgggagcgtgctttccacgacggtgacacgcttccctggattgggtaagctcctgactgaacttgatgagtcctctctgagtcacgggctctcggctccgtgtattttcagctcgggaaaatcgctggggctgggggtggggcagtggggacttagcgagtttgggggtgagtgggatggaagcttggctagagggatcatcataggagttgcattgttgggagacctgggtgtagatgatggggatgttaggaccatccgaactcaaagttgaacgcctaggcagaggagtggagctttggggaaccttgagccggcctaaagcgtacttctttgcacatccacccggtgctgggcgtagggaatccct

SEQ ID NO: 584 - DNA, 1500 bp, Homo sapiens
ccaccacccccaccccaaccccagccccctagcagagacctgtgggaagcgaaaattccatgggactgactttctgctcttgtctttcagacttcctgaaaacaacgttctggtaaggacaagggttgggctggggacctggagggctggggacctggagggctggggggctggggggctgaggacctggtcctctgactgctcttttcacccatctacagtcccccttgccgtcccaagcaatggatgatttgatgctgtccccggacgatattgaacaatggttcactgaagacccaggtccagatgaagctcccagaatgccagaggctgctccccccgtggcccctgcaccagcagctcctacaccggcggcccctgcaccagccccctcctggcccctgtcatcttctgtcccttcccagaaaacctaccagggcagctacggtttccgtctgggcttcttgcattctgggacagccaagtctgtgacttgcacggtcagttgccctgaggggctggcttccatgagacttcaatgcctggccgtatccccctgcatttcttttgtttggaactttgggattcctcttcaccctttggcttcctgtcagtgtttttttatagtttacccacttaatgtgtgatctctgactcctgtcccaaagttgaatattccccccttgaatttgggcttttatccatcccatcacaccctcagcatctctcctggggatgcagaacttttctttttcttcatccacgtgtattccttggcttttgaaaataagctcctgaccaggcttggtggctcacacctgcaatcccagcactctcaaagaggccaaggcaggcagatcacctgagcccaggagttcaagaccagcctgggtaacatgatgaaacctcgtctctacaaaaaaatacaaaaaattagccaggcatggtggtgcacacctatagtcccagccacttaggaggctgaggtgggaagatcacttgaggccaggagatggaggctgcagtgagctgtgatcacaccactgtgctccagcctgagtgacagagcaagaccctatctcaaaaaaaaaaaaaaaaaagaaaagctcctgaggtgtagacgccaactctctctagctcgctagtgggttgcaggaggtgcttacgcatgtttgtttctttgctgccgtcttccagttgctttatctgttcacttgtgccctgactttcaactctgtctccttcctcttcctacagtactcccctgccctcaacaagatgttttgccaactggccaagacctgccctgtgcagctgtgggttgattccacacccccgcccggcacccgcgtccgcgccatggccatctacaagcagtcacagcacatgacggaggttgtgaggcgctgcccccaccatgagcgctgctcagatagcgatggtgagcagctggggctggagagacgacagggctggttgcccagggtccccaggcctctg

SEQ ID NO: 585 - DNA, 1174 bp, Homo sapiens
acaatgaataagatagtagaaaaattctatatcctcataaggcttacgtttccatgtactgaaagcaatgaacaaataaatcttatcagagtgataagggttgtgaaggagattaaataagatggtgtgatataaagtatctgggagaaaacgttagggtgtgatattacggaaagccttcctaaaaaatgacattttaactgatgagaagaaaggatccagctgagagcaaacgcaaaagctttcttccttccacccttcatatttgacacaatgcaggattcctccaaaatgatttccaccaattctgccctcacagctctggcttgcagaattttccaccccaaaatgttagtatctacggcaccaggtcggcgagaatcctgactctgcaccctcctccccaactccatttcctttgcttcctccggcaggcggattacttgcccttacttgtcatggcgactgtccagctttgtgccaggagcctcgcaggggttgatgggattggggttttcccctcccatgtgctcaagactggcgctaaaagttttgagcttctcaaaagtctagagccaccgtccagggagcaggtagctgctgggctccggggacactttgcgttcgggctgggagcgtgctttccacgacggtgacacgcttccctggattgggtaagctcctgactgaacttgatgagtcctctctgagtcacgggctctcggctccgtgtattttcagctcgggaaaatcgctggggctgggggtggggcagtggggacttagcgagtttgggggtgagtgggatggaagcttggctagagggatcatcataggagttgcattgttgggagacctgggtgtagatgatggggatgttaggaccatccgaactcaaagttgaacgcctaggcagaggagtggagctttggggaaccttgagccggcctaaagcgtacttctttgcacatccacccggtgctgggcgtagggaatccctgaaataaaagatgcacaaagcattgaggtctgagacttttggatctcgaaacattgagaactcatagctgtatattttagagcccatggcatcctagtgaaaactggggctccattccgaaatgatcatttgggggtgatccggggagcccaagctgctaaggtcccacaactt

SEQ ID NO: 586 - DNA, 1102 bp, Homo sapiens
tctactaaaaatacaaaaattagctgggtgtggtggtactcgcctgtaatcccagctactcgggagactgaggcaggagaatggcttgaacccggaaggtagaggttgcagtgagctgagatcatgccactgtgctccagcctaggtgacagagagagactccatctcaaaaaaaaaaaaaaaatacaggaagggagttgggaatagggtgcacatttaggaagtcttggggatttagtggtgggaaggttggaagtccctctctgattgtcttttcctcaaagaagtgcatggctggtgaggggtggggcaggagtgcttgggttgtggtgaaacattggaagagagaatgtgaagcagccattcttttcctgctccacaggaagccgagctgtctcagacactggcatggtgttgggggagggggttccttctctgcaggcccaggtgacccagggttggaagtgtctcatgctggatccccacttttcctcttgcagcagccagactgccttccgggtcactgccatggaggagccgcagtcagatcctagcgtcgagccccctctgagtcaggaaacattttcagacctatggaaactgtgagtggatccattggaagggcaggcccaccacccccaccccaaccccagccccctagcagagacctgtgggaagcgaaaattccatgggactgactttctgctcttgtctttcagacttcctgaaaacaacgttctggtaaggacaagggttgggctggggacctggagggctggggacctggagggctggggggctggggggctgaggacctggtcctctgactgctcttttcacccatctacagtcccccttgccgtcccaagcaatggatgatttgatgctgtccccggacgatattgaacaatggttcactgaagacccaggtccagatgaagctcccagaatgccagaggctgctccccccgtggcccctgcaccagcagctcctacaccggcggcccctgcaccagccccctcctggcccctgtcatcttctgtcccttcccagaaaacctaccagggcagctacggtttccgtctgggcttcttgcattct

SEQ ID NO: 587 - DNA, 1241 bp, Homo sapiens
tctactaaaaatacaaaaattagctgggtgtggtggtactcgcctgtaatcccagctactcgggagactgaggcaggagaatggcttgaacccggaaggtagaggttgcagtgagctgagatcatgccactgtgctccagcctaggtgacagagagagactccatctcaaaaaaaaaaaaaaaatacaggaagggagttgggaatagggtgcacatttaggaagtcttggggatttagtggtgggaaggttggaagtccctctctgattgtcttttcctcaaagaagtgcatggctggtgaggggtggggcaggagtgcttgggttgtggtgaaacattggaagagagaatgtgaagcagccattcttttcctgctccacaggaagccgagctgtctcagacactggcatggtgttgggggagggggttccttctctgcaggcccaggtgacccagggttggaagtgtctcatgctggatccccacttttcctcttgcagcagccagactgccttccgggtcactgccatggaggagccgcagtcagatcctagcgtcgagccccctctgagtcaggaaacattttcagacctatggaaactgtgagtggatccattggaagggcaggcccaccacccccaccccaaccccagccccctagcagagacctgtgggaagcgaaaattccatgggactgactttctgctcttgtctttcagacttcctgaaaacaacgttctggtaaggacaagggttgggctggggacctggagggctggggacctggagggctggggggctggggggctgaggacctggtcctctgactgctcttttcacccatctacagtcccccttgccgtcccaagcaatggatgatttgatgctgtccccggacgatattgaacaatggttcactgaagacccaggtccagatgaagctcccagaatgccagaggctgctccccccgtggcccctgcaccagcagctcctacaccggcggcccctgcaccagccccctcctggcccctgtcatcttctgtcccttcccagaaaacctaccagggcagctacggtttccgtctgggcttcttgcattctgggacagccaagtctgtgacttgcacggtcagttgccctgaggggctggcttccatgagacttcaatgcctggccgtatccccctgcatttcttttgtttggaactttgggattcctcttcaccctttggcttcctgtc

SEQ ID NO: 588 - DNA, 1022 bp, Homo sapiens
ggaagtcttggggatttagtggtgggaaggttggaagtccctctctgattgtcttttcctcaaagaagtgcatggctggtgaggggtggggcaggagtgcttgggttgtggtgaaacattggaagagagaatgtgaagcagccattcttttcctgctccacaggaagccgagctgtctcagacactggcatggtgttgggggagggggttccttctctgcaggcccaggtgacccagggttggaagtgtctcatgctggatccccacttttcctcttgcagcagccagactgccttccgggtcactgccatggaggagccgcagtcagatcctagcgtcgagccccctctgagtcaggaaacattttcagacctatggaaactgtgagtggatccattggaagggcaggcccaccacccccaccccaaccccagccccctagcagagacctgtgggaagcgaaaattccatgggactgactttctgctcttgtctttcagacttcctgaaaacaacgttctggtaaggacaagggttgggctggggacctggagggctggggacctggagggctggggggctggggggctgaggacctggtcctctgactgctcttttcacccatctacagtcccccttgccgtcccaagcaatggatgatttgatgctgtccccggacgatattgaacaatggttcactgaagacccaggtccagatgaagctcccagaatgccagaggctgctccccccgtggcccctgcaccagcagctcctacaccggcggcccctgcaccagccccctcctggcccctgtcatcttctgtcccttcccagaaaacctaccagggcagctacggtttccgtctgggcttcttgcattctgggacagccaagtctgtgacttgcacggtcagttgccctgaggggctggcttccatgagacttcaatgcctggccgtatccccctgcatttcttttgtttggaactttgggattcctcttcaccctttggcttcctgtc

SEQ ID NO: 589 - DNA, 1279 bp, Homo sapiens
tgtgaagcagccattcttttcctgctccacaggaagccgagctgtctcagacactggcatggtgttgggggagggggttccttctctgcaggcccaggtgacccagggttggaagtgtctcatgctggatccccacttttcctcttgcagcagccagactgccttccgggtcactgccatggaggagccgcagtcagatcctagcgtcgagccccctctgagtcaggaaacattttcagacctatggaaactgtgagtggatccattggaagggcaggcccaccacccccaccccaaccccagccccctagcagagacctgtgggaagcgaaaattccatgggactgactttctgctcttgtctttcagacttcctgaaaacaacgttctggtaaggacaagggttgggctggggacctggagggctggggacctggagggctggggggctggggggctgaggacctggtcctctgactgctcttttcacccatctacagtcccccttgccgtcccaagcaatggatgatttgatgctgtccccggacgatattgaacaatggttcactgaagacccaggtccagatgaagctcccagaatgccagaggctgctccccccgtggcccctgcaccagcagctcctacaccggcggcccctgcaccagccccctcctggcccctgtcatcttctgtcccttcccagaaaacctaccagggcagctacggtttccgtctgggcttcttgcattctgggacagccaagtctgtgacttgcacggtcagttgccctgaggggctggcttccatgagacttcaatgcctggccgtatccccctgcatttcttttgtttggaactttgggattcctcttcaccctttggcttcctgtcagtgtttttttatagtttacccacttaatgtgtgatctctgactcctgtcccaaagttgaatattccccccttgaatttgggcttttatccatcccatcacaccctcagcatctctcctggggatgcagaacttttctttttcttcatccacgtgtattccttggcttttgaaaataagctcctgaccaggcttggtggctcacacctgcaatcccagcactctcaaagaggccaaggcaggcagatcacctgagcccaggagttcaagaccagcctgggtaacatgatgaaacctcgtctctacaaaaaaatacaaaaaattagccaggcatggtggtgcacacctatagtcccagccacttaggaggctgaggtgggaagatcact

SEQ ID NO: 590 - DNA, 1184 bp, Homo sapiens
catccacgtgtattccttggcttttgaaaataagctcctgaccaggcttggtggctcacacctgcaatcccagcactctcaaagaggccaaggcaggcagatcacctgagcccaggagttcaagaccagcctgggtaacatgatgaaacctcgtctctacaaaaaaatacaaaaaattagccaggcatggtggtgcacacctatagtcccagccacttaggaggctgaggtgggaagatcacttgaggccaggagatggaggctgcagtgagctgtgatcacaccactgtgctccagcctgagtgacagagcaagaccctatctcaaaaaaaaaaaaaaaaaagaaaagctcctgaggtgtagacgccaactctctctagctcgctagtgggttgcaggaggtgcttacgcatgtttgtttctttgctgccgtcttccagttgctttatctgttcacttgtgccctgactttcaactctgtctccttcctcttcctacagtactcccctgccctcaacaagatgttttgccaactggccaagacctgccctgtgcagctgtgggttgattccacacccccgcccggcacccgcgtccgcgccatggccatctacaagcagtcacagcacatgacggaggttgtgaggcgctgcccccaccatgagcgctgctcagatagcgatggtgagcagctggggctggagagacgacagggctggttgcccagggtccccaggcctctgattcctcactgattgctcttaggtctggcccctcctcagcatcttatccgagtggaaggaaatttgcgtgtggagtatttggatgacagaaacacttttcgacatagtgtggtggtgccctatgagccgcctgaggtctggtttgcaactggggtctctgggaggaggggttaagggtggttgtcagtggccctccaggtgagcagtaggggggctttctcctgctgcttatttgacctccctataaccccatgagatgtgcaaagtaaatgggtttaactattgcacagttgaaaaaactgaagcttacagaggctaagggcctcccctgcttggctgggcgcagtggctcatgcctgtaatcccagcactttgggaggccaaggcaggcggatcacgaggttgggagatcgagaccatcctggctaacggtgaaacccc

SEQ ID NO: 591 - DNA, 1113 bp, Homo sapiens
cagtgagctgtgatcacaccactgtgctccagcctgagtgacagagcaagaccctatctcaaaaaaaaaaaaaaaaaagaaaagctcctgaggtgtagacgccaactctctctagctcgctagtgggttgcaggaggtgcttacgcatgtttgtttctttgctgccgtcttccagttgctttatctgttcacttgtgccctgactttcaactctgtctccttcctcttcctacagtactcccctgccctcaacaagatgttttgccaactggccaagacctgccctgtgcagctgtgggttgattccacacccccgcccggcacccgcgtccgcgccatggccatctacaagcagtcacagcacatgacggaggttgtgaggcgctgcccccaccatgagcgctgctcagatagcgatggtgagcagctggggctggagagacgacagggctggttgcccagggtccccaggcctctgattcctcactgattgctcttaggtctggcccctcctcagcatcttatccgagtggaaggaaatttgcgtgtggagtatttggatgacagaaacacttttcgacatagtgtggtggtgccctatgagccgcctgaggtctggtttgcaactggggtctctgggaggaggggttaagggtggttgtcagtggccctccaggtgagcagtaggggggctttctcctgctgcttatttgacctccctataaccccatgagatgtgcaaagtaaatgggtttaactattgcacagttgaaaaaactgaagcttacagaggctaagggcctcccctgcttggctgggcgcagtggctcatgcctgtaatcccagcactttgggaggccaaggcaggcggatcacgaggttgggagatcgagaccatcctggctaacggtgaaaccccgtctctactgaaaaatacaaaaaaaaattagccgggcgtggtgctgggcacctgtagtcccagctactcgggaggctgaggaaggagaatggcgtgaacctgggcggtggagcttgcagtgagctgagatcacgccactgcactccagcctgggcgacagagcgagattccatctcaaaaaaaaaaaaaaaagg

SEQ ID NO: 592 - DNA, 1441 bp, Homo sapiens
gtcagttgccctgaggggctggcttccatgagacttcaatgcctggccgtatccccctgcatttcttttgtttggaactttgggattcctcttcaccctttggcttcctgtcagtgtttttttatagtttacccacttaatgtgtgatctctgactcctgtcccaaagttgaatattccccccttgaatttgggcttttatccatcccatcacaccctcagcatctctcctggggatgcagaacttttctttttcttcatccacgtgtattccttggcttttgaaaataagctcctgaccaggcttggtggctcacacctgcaatcccagcactctcaaagaggccaaggcaggcagatcacctgagcccaggagttcaagaccagcctgggtaacatgatgaaacctcgtctctacaaaaaaatacaaaaaattagccaggcatggtggtgcacacctatagtcccagccacttaggaggctgaggtgggaagatcacttgaggccaggagatggaggctgcagtgagctgtgatcacaccactgtgctccagcctgagtgacagagcaagaccctatctcaaaaaaaaaaaaaaaaaagaaaagctcctgaggtgtagacgccaactctctctagctcgctagtgggttgcaggaggtgcttacgcatgtttgtttctttgctgccgtcttccagttgctttatctgttcacttgtgccctgactttcaactctgtctccttcctcttcctacagtactcccctgccctcaacaagatgttttgccaactggccaagacctgccctgtgcagctgtgggttgattccacacccccgcccggcacccgcgtccgcgccatggccatctacaagcagtcacagcacatgacggaggttgtgaggcgctgcccccaccatgagcgctgctcagatagcgatggtgagcagctggggctggagagacgacagggctggttgcccagggtccccaggcctctgattcctcactgattgctcttaggtctggcccctcctcagcatcttatccgagtggaaggaaatttgcgtgtggagtatttggatgacagaaacacttttcgacatagtgtggtggtgccctatgagccgcctgaggtctggtttgcaactggggtctctgggaggaggggttaagggtggttgtcagtggccctccaggtgagcagtaggggggctttctcctgctgcttatttgacctccctataaccccatgagatgtgcaaagtaaatgggtttaactattgcacagttgaaaaaactgaagcttacagaggctaagggcctcccctgcttggctgggcgcagtggctcatgcctgtaatcccagcactttgggaggccaaggcaggcggatcacgaggttgggagatcgagaccatcctggctaacggtgaaacccc

SEQ ID NO: 593 - DNA, 1110 bp, Homo sapiens
cagtaggggggctttctcctgctgcttatttgacctccctataaccccatgagatgtgcaaagtaaatgggtttaactattgcacagttgaaaaaactgaagcttacagaggctaagggcctcccctgcttggctgggcgcagtggctcatgcctgtaatcccagcactttgggaggccaaggcaggcggatcacgaggttgggagatcgagaccatcctggctaacggtgaaaccccgtctctactgaaaaatacaaaaaaaaattagccgggcgtggtgctgggcacctgtagtcccagctactcgggaggctgaggaaggagaatggcgtgaacctgggcggtggagcttgcagtgagctgagatcacgccactgcactccagcctgggcgacagagcgagattccatctcaaaaaaaaaaaaaaaaggcctcccctgcttgccacaggtctccccaaggcgcactggcctcatcttgggcctgtgttatctcctaggttggctctgactgtaccaccatccactacaactacatgtgtaacagttcctgcatgggcggcatgaaccggaggcccatcctcaccatcatcacactggaagactccaggtcaggagccacttgccaccctgcacactggcctgctgtgccccagcctctgcttgcctctgacccctgggcccacctcttaccgatttcttccatactactacccatccacctctcatcacatccccggcggggaatctccttactgctcccactcagttttcttttctctggctttgggacctcttaacctgtggcttctcctccacctacctggagctggagcttaggctccagaaaggacaagggtggttgggagtagatggagcctggttttttaaatgggacaggtaggacctgatttccttactgcctcttgcttctcttttcctatcctgagtagtggtaatctactgggacggaacagctttgaggtgcgtgtttgtgcctgtcctgggagagaccggcgcacagaggaagagaatctccgcaagaaaggggagcctcaccacgagctgcccccagggagcactaagcgaggtaagcaagcaggacaagaa

SEQ ID NO: 594 - DNA, 1137 bp, Homo sapiens
ctccccaaggcgcactggcctcatcttgggcctgtgttatctcctaggttggctctgactgtaccaccatccactacaactacatgtgtaacagttcctgcatgggcggcatgaaccggaggcccatcctcaccatcatcacactggaagactccaggtcaggagccacttgccaccctgcacactggcctgctgtgccccagcctctgcttgcctctgacccctgggcccacctcttaccgatttcttccatactactacccatccacctctcatcacatccccggcggggaatctccttactgctcccactcagttttcttttctctggctttgggacctcttaacctgtggcttctcctccacctacctggagctggagcttaggctccagaaaggacaagggtggttgggagtagatggagcctggttttttaaatgggacaggtaggacctgatttccttactgcctcttgcttctcttttcctatcctgagtagtggtaatctactgggacggaacagctttgaggtgcgtgtttgtgcctgtcctgggagagaccggcgcacagaggaagagaatctccgcaagaaaggggagcctcaccacgagctgcccccagggagcactaagcgaggtaagcaagcaggacaagaagcggtggaggagaccaagggtgcagttatgcctcagattcacttttatcacctttccttgcctctttcctagcactgcccaacaacaccagctcctctccccagccaaagaagaaaccactggatggagaatatttcacccttcaggtactaagtcttgggacctcttatcaagtggaaagtttccagtctaacactcaaaatgccgttttcttcttgactgttttacctgcaattggggcatttgccatcagggggcagtgatgcctcaaagacaatggctcctggttgtagctaactaacttcagaacaccaacttataccataatatatattttaaaggaccagaccagctttcaaaaagaaaattgttaaagagagcatgaaaatggttctatgactttgcctgatacagatgctacttgacttacgatggtgttacttcctgataaactcgtcgtaagttgaaaatattgtaagt

SEQ ID NO: 595 - DNA, 1074 bp, Homo sapiens
ccacctcttaccgatttcttccatactactacccatccacctctcatcacatccccggcggggaatctccttactgctcccactcagttttcttttctctggctttgggacctcttaacctgtggcttctcctccacctacctggagctggagcttaggctccagaaaggacaagggtggttgggagtagatggagcctggttttttaaatgggacaggtaggacctgatttccttactgcctcttgcttctcttttcctatcctgagtagtggtaatctactgggacggaacagctttgaggtgcgtgtttgtgcctgtcctgggagagaccggcgcacagaggaagagaatctccgcaagaaaggggagcctcaccacgagctgcccccagggagcactaagcgaggtaagcaagcaggacaagaagcggtggaggagaccaagggtgcagttatgcctcagattcacttttatcacctttccttgcctctttcctagcactgcccaacaacaccagctcctctccccagccaaagaagaaaccactggatggagaatatttcacccttcaggtactaagtcttgggacctcttatcaagtggaaagtttccagtctaacactcaaaatgccgttttcttcttgactgttttacctgcaattggggcatttgccatcagggggcagtgatgcctcaaagacaatggctcctggttgtagctaactaacttcagaacaccaacttataccataatatatattttaaaggaccagaccagctttcaaaaagaaaattgttaaagagagcatgaaaatggttctatgactttgcctgatacagatgctacttgacttacgatggtgttacttcctgataaactcgtcgtaagttgaaaatattgtaagttgaaaatggatttaatacacctaatctaaggaacatcatagcttagcctagcctgctttttttttttttttttttggagacagagtctcactctgtcacccaggctggagtgcagtggcgggatctcggctcactgcaacctccgccttctgggttcaagcgattc

SEQ ID NO: 596 - DNA, 1107 bp, Homo sapiens
gcctgaacaacatagcaagacatcatctctaaaatttaaaaaagggccgggcacagtggctcacacctgtaatcccagcactttgggaggtggaggtgggtagatcacctgacgtcaggagttggaaaccagcctggctaacatggtgaagccccatctctactaaaaacacaaaaattagccaggtgtggtagcacacgcctgtagtcccagctactcgggaggctgaggcacaagaatcacttgaaccccagaggcggagattgcaatcagccaagattgcaccattgcactcccgcctgggcaacagagtgagaccccatctcaaaataaataaataaatatttttaaaagtcagctgtataggtacttgaagtgcagtttctactaaatgcatgttgcttttgtaccgtcataaagtcaaacaattgtaacttgaaccatcttttaactcaggtactgtgtatatacttacttctccccctcctctgttgctgcagatccgtgggcgtgagcgcttcgagatgttccgagagctgaatgaggccttggaactcaaggatgcccaggctgggaaggagccaggggggagcagggctcactccaggtgagtgacctcagccccttcctggccctactcccctgccttcctaggttggaaagccataggattccattctcatcctgccttcatggtcaaaggcagctgaccccatctcattgggtcccagccctgcacagacatttttttagtcttcctccggttgaatcctataaccacattcttgcctcagtgtatccacagaacatccaaacccagggacgagtgtggatacttctttgccattctccgcaactcccagcccagagctggagggtctcaaggaggggcctaataattgtgtaatactgaatacagccagagtttcaggtcatatactcagccctgccatgcaccggcaggtcctaggtgacccccgtcaaactcagtttccttatatataaaatggggtaagggggccgggcgcagtggctcacgaatcccacactctgggaggccaaggcgagtggatcacctgaggtcgggagtttgagcccagcctgacc

SEQ ID NO: 597 - DNA, 1060 bp, Homo sapiens
aggaagagaatctccgcaagaaaggggagcctcaccacgagctgcccccagggagcactaagcgaggtaagcaagcaggacaagaagcggtggaggagaccaagggtgcagttatgcctcagattcacttttatcacctttccttgcctctttcctagcactgcccaacaacaccagctcctctccccagccaaagaagaaaccactggatggagaatatttcacccttcaggtactaagtcttgggacctcttatcaagtggaaagtttccagtctaacactcaaaatgccgttttcttcttgactgttttacctgcaattggggcatttgccatcagggggcagtgatgcctcaaagacaatggctcctggttgtagctaactaacttcagaacaccaacttataccataatatatattttaaaggaccagaccagctttcaaaaagaaaattgttaaagagagcatgaaaatggttctatgactttgcctgatacagatgctacttgacttacgatggtgttacttcctgataaactcgtcgtaagttgaaaatattgtaagttgaaaatggatttaatacacctaatctaaggaacatcatagcttagcctagcctgctttttttttttttttttttggagacagagtctcactctgtcacccaggctggagtgcagtggcgggatctcggctcactgcaacctccgccttctgggttcaagcgattctcctgcctcagcccactgagtagctgggattacaggcacctgccccgacgcccagctaattttttgttatttatttatttttttttttagtagagatgaggtttcaccatgttggccaggctagtctcgaactcctgaccttgtgatctgcctgccttggcctcccaaagtgctgggattacaggcgtgagccaccgcacccggcctgcctagcctacttttattttatttttaatggagacagcatcttgctctgttgcccaggctggattacagtgatgtgatcatagctcattataccctcctgggctcaagcaatccccctaac

SEQ ID NO: 598 - DNA, 1133 bp, Homo sapiens
agtggtaatctactgggacggaacagctttgaggtgcgtgtttgtgcctgtcctgggagagaccggcgcacagaggaagagaatctccgcaagaaaggggagcctcaccacgagctgcccccagggagcactaagcgaggtaagcaagcaggacaagaagcggtggaggagaccaagggtgcagttatgcctcagattcacttttatcacctttccttgcctctttcctagcactgcccaacaacaccagctcctctccccagccaaagaagaaaccactggatggagaatatttcacccttcaggtactaagtcttgggacctcttatcaagtggaaagtttccagtctaacactcaaaatgccgttttcttcttgactgttttacctgcaattggggcatttgccatcagggggcagtgatgcctcaaagacaatggctcctggttgtagctaactaacttcagaacaccaacttataccataatatatattttaaaggaccagaccagctttcaaaaagaaaattgttaaagagagcatgaaaatggttctatgactttgcctgatacagatgctacttgacttacgatggtgttacttcctgataaactcgtcgtaagttgaaaatattgtaagttgaaaatggatttaatacacctaatctaaggaacatcatagcttagcctagcctgctttttttttttttttttttggagacagagtctcactctgtcacccaggctggagtgcagtggcgggatctcggctcactgcaacctccgccttctgggttcaagcgattctcctgcctcagcccactgagtagctgggattacaggcacctgccccgacgcccagctaattttttgttatttatttatttttttttttagtagagatgaggtttcaccatgttggccaggctagtctcgaactcctgaccttgtgatctgcctgccttggcctcccaaagtgctgggattacaggcgtgagccaccgcacccggcctgcctagcctacttttattttatttttaatggagacagcatcttgctctgttgcccaggctggattacagtgatgtgatcatagctcattataccctcctgggctcaagcaatccccctaac

SEQ ID NO: 599 - DNA, 2289 bp, Homo sapiens
cgcagtggctcacgaatcccacactctgggaggccaaggcgagtggatcacctgaggtcgggagtttgagcccagcctgaccaacatggagaaaccccatctctactaaaaatacaaaagtagccgggcgtggtgatgcatgcctgtaatcccagctacctactcgggaggctgaggcaggagaatcgcttgaacccgggaggcagaggttgcggtgagctgagatctcaccattacactccagcctgggcaacaagagtgaaactccgtctcaaaaaagataaataaagtaaaatggggtaagggaagattacgagactaatacacactaatactctgaggtgctcagtaaacatatttgcatggggtgtggccaccatcttgatttgaattcccgttgtcccagccttaggcccttcaaagcattggtcagggaaaaggggcacagaccctctcactcatgtgatgtcatctctcctccctgcttctgtctcctacagccacctgaagtccaaaaagggtcagtctacctcccgccataaaaaactcatgttcaagacagaagggcctgactcagactgacattctccacttcttgttccccactgacagcctcccacccccatctctccctcccctgccattttgggttttgggtctttgaacccttgcttgcaataggtgtgcgtcagaagcacccaggacttccatttgctttgtcccggggctccactgaacaagttggcctgcactggtgttttgttgtggggaggaggatggggagtaggacataccagcttagattttaaggtttttactgtgagggatgtttgggagatgtaagaaatgttcttgcagttaagggttagtttacaatcagccacattctaggtaggggcccacttcaccgtactaaccagggaagctgtccctcactgttgaattttctctaacttcaaggcccatatctgtgaaatgctggcatttgcacctacctcacagagtgcattgtgagggttaatgaaataatgtacatctggccttgaaaccaccttttattacatggggtctagaacttgacccccttgagggtgcttgttccctctccctgttggtcggtgggttggtagtttctacagttgggcagctggttaggtagagggagttgtcaagtctctgctggcccagccaaaccctgtctgacaacctcttggtgaaccttagtacctaaaaggaaatctcaccccatcccacaccctggaggatttcatctcttgtatatgatgatctggatccaccaagacttgttttatgctcagggtcaatttcttttttcttttttttttttttttttctttttctttgagactgggtctcgctttgttgcccaggctggagtggagtggcgtgatcttggcttactgcagcctttgcctccccggctcgagcagtcctgcctcagcctccggagtagctgggaccacaggttcatgccaccatggccagccaacttttgcatgttttgtagagatggggtctcacagtgttgcccaggctggtctcaaactcctgggctcaggcgatccacctgtctcagcctcccagagtgctgggattacaattgtgagccaccacgtccagctggaagggtcaacatcttttacattctgcaagcacatctgcattttcaccccacccttcccctccttctccctttttatatcccatttttatatcgatctcttattttacaataaaactttgctgccacctgtgtgtctgaggggtgaacgccagtgcaggctactggggtcagcaggtgcaggggtgagtgaggaggtgctgggaagcagccacctgagtctgcaatgagtgtgggctggggggcccagtgcccgggttccgggaggggaacaaaggctggagactgggtcagtctgcgggctgcatgacaacaagggagggggtggctccattcataactcaggaaccaaccgtccctcctcccctccggccacggctggcacaaggttctctccctcccctgcttctaggactgggctgcttccccctcggcagcctctcaccaaggattacgggatttaaatgtctgatttagcaaggctgagcctccagggtggccatctgctccatcagaaagtggcaggatacctgggttcccaaggggaacaggggtgggtgctactggatggagagaggccagtgggaggcctgctagccagggtcccaggaaagtgggggcagctaaggtaagagtaggggtgtggg

SEQ ID NO: 600 - DNA, 1500 bp, Homo sapiens
tggatccaccaagacttgttttatgctcagggtcaatttcttttttcttttttttttttttttttctttttctttgagactgggtctcgctttgttgcccaggctggagtggagtggcgtgatcttggcttactgcagcctttgcctccccggctcgagcagtcctgcctcagcctccggagtagctgggaccacaggttcatgccaccatggccagccaacttttgcatgttttgtagagatggggtctcacagtgttgcccaggctggtctcaaactcctgggctcaggcgatccacctgtctcagcctcccagagtgctgggattacaattgtgagccaccacgtccagctggaagggtcaacatcttttacattctgcaagcacatctgcattttcaccccacccttcccctccttctccctttttatatcccatttttatatcgatctcttattttacaataaaactttgctgccacctgtgtgtctgaggggtgaacgccagtgcaggctactggggtcagcaggtgcaggggtgagtgaggaggtgctgggaagcagccacctgagtctgcaatgagtgtgggctggggggcccagtgcccgggttccgggaggggaacaaaggctggagactgggtcagtctgcgggctgcatgacaacaagggagggggtggctccattcataactcaggaaccaaccgtccctcctcccctccggccacggctggcacaaggttctctccctcccctgcttctaggactgggctgcttccccctcggcagcctctcaccaaggattacgggatttaaatgtctgatttagcaaggctgagcctccagggtggccatctgctccatcagaaagtggcaggatacctgggttcccaaggggaacaggggtgggtgctactggatggagagaggccagtgggaggcctgctagccagggtcccaggaaagtgggggcagctaaggtaagagtaggggtgtggggctaggtccttcccagcatcccctcatcctgggcctcatgccaggtagctgaatgaattgaagctttaaactctgccaggaaaacctttcaaagggcttcttgggatagggaggagagtcgggttgaggagctcagtactgcctgcccatgctcctcagggctgctggctcccagggaggggggctgggagcaggcaggctcttccccatcacccactgctctcttggagccagtgcttgaaggggcagtcagacatggcttgcccttcctcctccctggtggtggagatgggtgttagggtccagtgggtgctactgtccaggggggcttctggggccaccagcctgtcagctcatcaaccaggctgaaggtgcaagcaggagccccttgccttgccccaaggatcccagacagctatgaagccaccagccttcctgacctcaagaccaccttttttttttctctttcttactagggaatgccaaacactctccccagg

SEQ ID NO: 601 - DNA, 4560 bp, Homo sapiens
cctcgcctccgttacaacggcctacggtgctggaggatccttctgcgcacgcgcacagcctccggccggctatttccgcgagcgcgttccatcctctaccgagcgcgcgcgaagactacggaggtcgactcgggagcgcgcacgcagctccgccccgcgtccgacccgcggatcccgcggcgtccggcccgggtggtctggatcgcggagggaatgccccggagggcggagaactgggacgaggccgaggtaggcgcggaggaggcaggcgtcgaagagtacggccctgaagaagacggcggggaggagtcgggcgccgaggagtccggcccggaagagtccggcccggaggaactgggcgccgaggaggagatggaggccgggcggccgcggcccgtgctgcgctcggtgaactcgcgcgagccctcccaggtcatcttctgcaatcgcagtccgcgcgtcgtgctgcccgtatggctcaacttcgacggcgagccgcagccctacccaacgctgccgcctggcacgggccgccgcatccacagctaccgaggtcacctttggctcttcagagatgcagggacacacgatgggcttctggttaaccaaactgaattatttgtgccatctctcaatgttgacggacagcctatttttgccaatatcacactgccagtgtatactctgaaagagcgatgcctccaggttgtccggagcctagtcaagcctgagaattacaggagactggacatcgtcaggtcgctctacgaagatctggaagaccacccaaatgtgcagaaagacctggagcggctgacacaggagcgcattgcacatcaacggatgggagattgaagatttctgttgaaacttacactgtttcatctcagcttttgatggtactgatgagtcttgatctagatacaggactggttccttccttagtttcaaagtgtctcattctcagagtaaaataggcaccattgcttaaaagaaagttaactgacttcactaggcattgtgatgtttaggggcaaacatcacaaaatgtaatttaatgcctgcccattagagaagtatttatcaggagaaggtggtggcatttttgcttcctagtaagtcaggacagcttgtatgtaaggaggtttgtataagtaattcagtgggaattgcagcatatcgtttaattttaagaaggcattggcatctgcttttaatggatgtataatacatccattctacatccgtagcggttggtgacttgtctgcctcctgctttgggaagactgaggcatccgtgaggcagggacaagtctttctcctctttgagaccccagtgcctgcacatcatgagccttcagtcagggtttgtcagaggaacaaaccaggggacactttgttagaaagtgcttagaggttctgcctctatttttgttggggggtgggagaggggaccttaaaatgtgtacagtgaacaaatgtcttaaagggaatcatttttgtaggaagcattttttataattttctaagtcgtgcactttctcggtccactcttgttgaagtgctgttttattactgtttctaaactaggattgacattctacagttgtgataatagcatttttgtaacttgccatccgcacagaaaatacgagaaaatctgcatgtttgattatagtattaatggacaaataagtttttgctaaatgtgagtatttctgttcctttttgtaaatatgtgacattcctgattgatttgggtttttttgttgttgttgttttgttttgttttgtttttttgagatggagtctcactcttgtcacccaggctggagtgcagtggcgccatctcggctcactgcaacctctgcctcctgggttcacgtaatcctcctgagtagctgggattacaggcgcctgccaccacgctggccaatttttgtacttttagtagagacagtgtttcgccatgttggccaggctggtttcaaactcctgacctcaggtgatccgcccacctcagcctcccaaaatggtgggattacaggtgtgtgggccaccgtgcctggctgattcagcattttttatcaggcaggaccaggtggcacttccacctccagcctctggtcctaccaatggattcatggagtagcctggactgtttcatagttttctaaatgtacaaattcttataggctagacttagattcattaactcaaattcaatgcttctatcagactcagttttttgtaactaatagatttttttttccacttttgttctactccttccctaatagctttttaaaaaaatctccccagtagagaaacatttggaaaagacagaaaactaaaaaggaagaaaaaagatccctattagatacacttcttaaatacaatcacattaacattttgagctatttccttccagcctttttagggcagattttggttggtttttacatagttgagattgtactgttcatacagttttataccctttttcatttaactttataacttaaatattgctctatgttagtataagcttttcacaaacattagtatagtctcccttttataattaatgtttgtgggtatttcttggcatgcatctttaattccttatcctagcctttgggcacaattcctgtgctcaaaaatgagagtgacggctggcatggtggctcccgcctgtaatcccagtactttggaaagccaaggtaagaggattgcttgagcccagaacttcaagatgagcctgggctcatagtgagaacccatctatacaaaaaatttttaaaaattagcatggcggcacacatctgtaatcctagctacttggcaggctgaggtgagaagatcattggagtttaggaattggaggctgcagtgagccatgagtatgccactgcactccagcctgggggacagagcaagaccctgcctcaaaaaaaaaaaaaaaaaaaaaatcaggccgggcatggtggctcacgcctgtaatcccagcactttgggaggtcgaggtgggcagatcacctgaggtcaggagttcgagaccagcctggccaacatggtaaaaccccatttctactaaaaaatacaagaattagctgggtgtggtggcgcatgcctgtaatcctagctactcaggaggctgaggcaggagaatcacttgaacccaggaggcgaagattgcagtgagctgatatcgcaccattgtactccagcctgtgtgacagagcaatactcttgtctcaaaaaaaaaaaaaaattcaaatcagagtgaagtgaatgagacactccagttttccttctactccgaatttcaactgattttagctcctcctttcaacattcaacaaatagtctttttttttttttttttttttttttttttgagatggagtctcactctgttgcccaggctggagtgcagtggtgcgatctctgctcactacaagctctgcctcccgagttcaagtgattctcctggctcaccctcctgagtagctgggattacaggcgcctgccaccatgcctggctaattttgtgtttttagtggagacggggtttcaccatgttgtccaggatggtcttgatctcctgaccttgtgatccacccacctcagcctcccaaagtgctgggattacaggtgtgagccaccgcgtccagccagctttattattttttttaagctgtctttgtgtcaaaatgatagttcatgctcctcttgttaaaacctgcaggccgagcacagtggctcatgcctgtaatcccagcattttgggagaccaaggcggatggatcacctgaggtcaggagctgaagaccagcctggctaacatggtgaaacctcatctccacttaaaatacaaaaattgccggccgcggcggctcatgcctgtaatcccagcactttgggaggcctaggcgggtggatcacgaggtcaggaaatcgagaccatcctggctaacacgggtgaaaccccgtctctattaaaaaatagaaaaaattaggcgggcgtggtggtgagcgcctgtagtcccagctactcgagagcctgaggcaggagaatggcatgaacctggaaggcggagcttgcagtgagctgagatggtgccactgcactctaacctgggcgacagagtgagacaccgtctcaaaaaaaaaaacaaaaaacaaaaattatccaggtgtggcggtgggcgcctgtgaggcaggcgaatctcttgaacccgggaggcggaggttgcagtgagccaagatcacaccattgcactccagcctgggcaacaagagtgaaattccatctcaaaaagaaaccaaaaaaacaaaaaaaaaacatgccgtttgagtactgtgtttttggtgttgtccaaggaaaattaaaaacctgtagcatgaataatgtttgtttttcatttcgaatcttgtgaatgtattaaatatatcgctcttaagagacggtgaagttcctatttcaagtttttttttttttttttttttttaaagctgttttttaatacattaaatggtgctgagtaaaggaaatag

SEQ ID NO: 602 - DNA, 4437 bp, Homo sapiens
cctcgcctccgttacaacggcctacggtgctggaggatccttctgcgcacgcgcacagcctccggccggctatttccgcgagcgcgttccatcctctaccgagcgcgcgcgaagactacggaggtcgactcgggagcgcgcacgcagctccgccccgcgtccgacccgcggatcccgcggcgtccggcccgggtggtctggatcgcggagggaatgccccggagggcggagaactgggacgaggccgaggtaggcgcggaggaggcaggcgtcgaagagtacggccctgaagaagacggcggggaggagtcgggcgccgaggagtccggcccggaagagtccggcccggaggaactgggcgccgaggaggagatggaggccgggcggccgcggcccgtgctgcgctcggtgaactcgcgcgagccctcccaggtcatcttctgcaatcgcagtccgcgcgtcgtgctgcccgtatggctcaacttcgacggcgagccgcagccctacccaacgctgccgcctggcacgggccgccgcatccacagctaccgagtgtatactctgaaagagcgatgcctccaggttgtccggagcctagtcaagcctgagaattacaggagactggacatcgtcaggtcgctctacgaagatctggaagaccacccaaatgtgcagaaagacctggagcggctgacacaggagcgcattgcacatcaacggatgggagattgaagatttctgttgaaacttacactgtttcatctcagcttttgatggtactgatgagtcttgatctagatacaggactggttccttccttagtttcaaagtgtctcattctcagagtaaaataggcaccattgcttaaaagaaagttaactgacttcactaggcattgtgatgtttaggggcaaacatcacaaaatgtaatttaatgcctgcccattagagaagtatttatcaggagaaggtggtggcatttttgcttcctagtaagtcaggacagcttgtatgtaaggaggtttgtataagtaattcagtgggaattgcagcatatcgtttaattttaagaaggcattggcatctgcttttaatggatgtataatacatccattctacatccgtagcggttggtgacttgtctgcctcctgctttgggaagactgaggcatccgtgaggcagggacaagtctttctcctctttgagaccccagtgcctgcacatcatgagccttcagtcagggtttgtcagaggaacaaaccaggggacactttgttagaaagtgcttagaggttctgcctctatttttgttggggggtgggagaggggaccttaaaatgtgtacagtgaacaaatgtcttaaagggaatcatttttgtaggaagcattttttataattttctaagtcgtgcactttctcggtccactcttgttgaagtgctgttttattactgtttctaaactaggattgacattctacagttgtgataatagcatttttgtaacttgccatccgcacagaaaatacgagaaaatctgcatgtttgattatagtattaatggacaaataagtttttgctaaatgtgagtatttctgttcctttttgtaaatatgtgacattcctgattgatttgggtttttttgttgttgttgttttgttttgttttgtttttttgagatggagtctcactcttgtcacccaggctggagtgcagtggcgccatctcggctcactgcaacctctgcctcctgggttcacgtaatcctcctgagtagctgggattacaggcgcctgccaccacgctggccaatttttgtacttttagtagagacagtgtttcgccatgttggccaggctggtttcaaactcctgacctcaggtgatccgcccacctcagcctcccaaaatggtgggattacaggtgtgtgggccaccgtgcctggctgattcagcattttttatcaggcaggaccaggtggcacttccacctccagcctctggtcctaccaatggattcatggagtagcctggactgtttcatagttttctaaatgtacaaattcttataggctagacttagattcattaactcaaattcaatgcttctatcagactcagttttttgtaactaatagatttttttttccacttttgttctactccttccctaatagctttttaaaaaaatctccccagtagagaaacatttggaaaagacagaaaactaaaaaggaagaaaaaagatccctattagatacacttcttaaatacaatcacattaacattttgagctatttccttccagcctttttagggcagattttggttggtttttacatagttgagattgtactgttcatacagttttataccctttttcatttaactttataacttaaatattgctctatgttagtataagcttttcacaaacattagtatagtctcccttttataattaatgtttgtgggtatttcttggcatgcatctttaattccttatcctagcctttgggcacaattcctgtgctcaaaaatgagagtgacggctggcatggtggctcccgcctgtaatcccagtactttggaaagccaaggtaagaggattgcttgagcccagaacttcaagatgagcctgggctcatagtgagaacccatctatacaaaaaatttttaaaaattagcatggcggcacacatctgtaatcctagctacttggcaggctgaggtgagaagatcattggagtttaggaattggaggctgcagtgagccatgagtatgccactgcactccagcctgggggacagagcaagaccctgcctcaaaaaaaaaaaaaaaaaaaaaatcaggccgggcatggtggctcacgcctgtaatcccagcactttgggaggtcgaggtgggcagatcacctgaggtcaggagttcgagaccagcctggccaacatggtaaaaccccatttctactaaaaaatacaagaattagctgggtgtggtggcgcatgcctgtaatcctagctactcaggaggctgaggcaggagaatcacttgaacccaggaggcgaagattgcagtgagctgatatcgcaccattgtactccagcctgtgtgacagagcaatactcttgtctcaaaaaaaaaaaaaaattcaaatcagagtgaagtgaatgagacactccagttttccttctactccgaatttcaactgattttagctcctcctttcaacattcaacaaatagtctttttttttttttttttttttttttttttgagatggagtctcactctgttgcccaggctggagtgcagtggtgcgatctctgctcactacaagctctgcctcccgagttcaagtgattctcctggctcaccctcctgagtagctgggattacaggcgcctgccaccatgcctggctaattttgtgtttttagtggagacggggtttcaccatgttgtccaggatggtcttgatctcctgaccttgtgatccacccacctcagcctcccaaagtgctgggattacaggtgtgagccaccgcgtccagccagctttattattttttttaagctgtctttgtgtcaaaatgatagttcatgctcctcttgttaaaacctgcaggccgagcacagtggctcatgcctgtaatcccagcattttgggagaccaaggcggatggatcacctgaggtcaggagctgaagaccagcctggctaacatggtgaaacctcatctccacttaaaatacaaaaattgccggccgcggcggctcatgcctgtaatcccagcactttgggaggcctaggcgggtggatcacgaggtcaggaaatcgagaccatcctggctaacacgggtgaaaccccgtctctattaaaaaatagaaaaaattaggcgggcgtggtggtgagcgcctgtagtcccagctactcgagagcctgaggcaggagaatggcatgaacctggaaggcggagcttgcagtgagctgagatggtgccactgcactctaacctgggcgacagagtgagacaccgtctcaaaaaaaaaaacaaaaaacaaaaattatccaggtgtggcggtgggcgcctgtgaggcaggcgaatctcttgaacccgggaggcggaggttgcagtgagccaagatcacaccattgcactccagcctgggcaacaagagtgaaattccatctcaaaaagaaaccaaaaaaacaaaaaaaaaacatgccgtttgagtactgtgtttttggtgttgtccaaggaaaattaaaaacctgtagcatgaataatgtttgtttttcatttcgaatcttgtgaatgtattaaatatatcgctcttaagagacggtgaagttcctatttcaagtttttttttttttttttttttttaaagctgttttttaatacattaaatggtgctgagtaaaggaaatag

What is claimed is:

1. A method for sequencing nucleic acids comprising: (1) isolating a plurality of nucleic acid molecules from a sample taken from a patient, each nucleic acid molecule comprising between A and B nucleotides in length, said plurality of nucleic acid molecules comprising one or more exons of a plurality of genes consisting of between W and X genes, and said plurality of genes comprising at least two genes in any of Panels A-Q; and (2) determining the sequence of said plurality of nucleic acid molecules.

2. A method for determining whether a patient has an increased risk of cancer, which comprises: (1) determining for a plurality of genes consisting of between W and X genes, said plurality of genes comprising at least two genes in any of Panels A-Q, whether the patient has a germline deficiency in any genes in said plurality of genes; and either (2) correlating a germline deficiency in any of said plurality of genes to an increased risk of cancer, or (3) correlating the absence of a germline deficiency in all of said plurality of genes to no increased risk of cancer.

3. The method of claim 2 further comprising (a) isolating a plurality of nucleic acid molecules from a sample taken from a patient, each nucleic acid molecule comprising between A and B nucleotides in length, and said plurality of nucleic acid molecules comprising one or more exons of said plurality of genes and (b) determining the sequence of said plurality of nucleic acid molecules.

4. The method of claim 3, further comprising detecting a germline deficiency in a gene by comparing the sequence determined in (b) with one or more reference sequences.

5. A method treating a patient comprising (1) determining for a plurality of genes consisting of between W and X genes, said plurality of genes comprising at least two genes in any of Panels A-Q, whether the patient has a germline deficiency in any genes in said plurality of genes; and (2)(a) correlating a germline deficiency in any of said plurality of genes to an increased risk of cancer, or (2)(b) correlating the absence of a germline deficiency in all of said plurality of genes to no increased risk of cancer; and (3) recommending, prescribing, or administering a treatment to reduce the patient's risk of cancer.

6. The method of claim 5, wherein said treatment comprises surgery to remove all or part of the organ in which the patient has an increased risk of cancer.

7. The method of claim 6, wherein said surgery is chosen from the group consisting of mastectomy, salpingo-oophorectomy, hysterectomy, colectomy, and prostatectomy.

8. The method of claim 5, wherein said treatment comprises preventive drug treatment.

9. The method of claim 8, wherein said preventive drug treatment comprises tamoxifen treatment.

10. A system comprising (1) computer program for receiving, storing, and/or retrieving a patient's sequence data for a plurality of genes consisting of between W and X genes, said plurality of genes comprising at least two genes in any of Panels A-Q; (2) computer program for querying this patient data; (3) optionally a computer program for comparing the patient's sequence data to one or more reference sequences to determine whether there is a mutation; (4) computer program for concluding whether there is an increased likelihood of cancer based on the presence or absence of a mutation; and optionally (4) computer program for outputting/displaying this conclusion.

11. A system for sequencing genes in a sample, comprising: (1) a sample analyzer for sequencing a plurality of genes consisting of between W and X genes, said plurality of genes comprising at least two genes in any of Panels A-Q, wherein the sample analyzer contains (a) the sample which is from a patient, (b) genomic DNA from the sample, (c) transcript RNA from the sample, or (d) DNA synthesized from said genomic DNA; (2) a first computer program for receiving test sequence data on the plurality of genes; and (3) a second computer program for comparing the sequence data to one or more reference sequences.

12. The system of claim 11, comprising a computer program for determining the patient's degree of risk of cancer based at least in part on the comparison of the test sequence with said one or more reference sequences.

13. The system of claim 12, wherein said computer program for determining the patient's degree of risk of cancer compares the patient's determined probability of a particular cancer with a reference probability to determine whether the patient has an increased risk of such cancer.

14. A composition comprising:
(a) nucleic acid probes hybridizing to a plurality of nucleic acid molecules comprising one or more exons of a plurality of genes consisting of between W and X genes, and said plurality of genes comprising at least two genes in any of Panels A-Q;
(b) nucleic acid primers and primer pairs suitable for selectively amplifying nucleic acids of (a);
(c) antibodies binding immunologically to polypeptides encoded by a plurality of genes consisting of between W and X genes, and said plurality of genes comprising at least two genes in any of Panels A-Q;
(d) a probe set comprising (a), (b) and/or (c); or
(e) a microarray comprising (a), (b), (c), and/or (d).

15. A kit comprising: reagents for sequencing nucleic acid molecules comprising one or more exons of a plurality of genes comprising a plurality of genes consisting of between W and X genes, said plurality of genes comprising at least two genes in any of Panels A-Q; and instructions for using said reagents.

16. The kit of claim 15, comprising a composition of claim 14.

17. The kit of claim 15, wherein said reagents are PCR primers specific for the plurality of genes.

18. The kit of claim 15, wherein said reagents are PCR primers specific for the exons of the plurality of genes.

19. The kit of claim 15, wherein said reagents are oligonucleotide probes specific for the exons of the plurality of genes.

20. The kit of claim 15, wherein said reagents are packaged into an array.

21. The method of any one of claim 1, 3, or 4, comprising comparing the sequences determined in an earlier step with one or more reference sequences.

22. The method of claim 21, comprising correlating a difference between the determined sequences and the one or more reference sequences to a mutation in one or more of the genes in the plurality of genes.

23. The method of claim 21 or claim 22, wherein the reference sequence for any given gene in the plurality is any of the sequences corresponding to that gene as shown in Table 3.

24. The system of any one of claims 10-13, comprising a computer program for determining whether the patient has a mutation in one or more of the genes in the plurality of genes by determining whether there is a difference between the determined sequences and the one or more reference sequences.

25. The system of claim 24, wherein the reference sequence for any given gene in the panel is any of the sequences corresponding to that gene as shown in Table 3.

26. The method of any one of claim 1-9, or 21-23, comprising correlating a germline deficiency in any particular gene in the plurality of genes to an increased risk of a particular cancer as shown in Table 4.

27. The method of any one of claim 1-9, 21-23, or 26, comprising diagnosing the patient with an increased risk of a particular cancer as shown in Table 4 based at least in part on a germline deficiency in any particular gene in the plurality of genes.

28. The method of any one of claims 1-9, 21-23, comprising correlating no germline deficiency in any gene in the plurality of genes with no increased risk of any cancer.

29. The system of any one of claims 10-13, comprising a computer program for determining the patient's degree of risk of any particular cancer as shown in Table 4 based at least in part on the comparison of the test sequence with said one or more reference sequences.

30. The method of any of claim 1, 3 or 4, wherein A=10, 11, 12, 13, 14, 15, 16, 17, 18, 19, 20, 25, 30, 35, 40, 45, 50, 60, 70, 80, 90, 100, 125, 150, 175, 200, 250, 300, 350, 400, 450, 500, 600, 700, 800, 900, 1,000, 1,250, 1,500, 1,750, 2,000, 2,500, 3,000, 3,500, 4,000, 5,000, 6,000, 7,000, 8,000, 9,000, 10,000, 12,000, 14,000, 16,000, 18,000, 20,000, 25,000, 30,000, 35,000, 40,000, 45,000, 50,000, 60,000, 70,000, 80,000, or 90,000, or more; and B=15, 16, 17, 18, 19, 20, 25, 30, 35, 40, 45, 50, 60, 70, 80, 90, 100, 125, 150, 175, 200, 250, 300, 350, 400, 450, 500, 600, 700, 800, 900, 1,000, 1,250, 1,500, 1,750, 2,000, 2,500, 3,000, 3,500, 4,000, 5,000, 6,000, 7,000, 8,000, 9,000, 10,000, 12,000, 14,000, 16,000, 18,000, 20,000, 25,000, 30,000, 35,000, 40,000, 45,000, 50,000, 60,000, 70,000, 80,000, 90,000, or 100,000 or more.

31. The method of any of claim 1, 3 or 4, wherein said plurality of DNA molecules comprises at least some length of intronic sequence adjacent to at least one of said one or more exons.

32. The method of claim 31, wherein said plurality of DNA molecules comprises at least 1, 2, 3, 4, 5, 6, 7, 8, 9, 10, 15, 20, 25, 30, 35, 40, 45, 50, 60, 70, 80, 90, 100, 200, 300, 400, 500 or more base pairs of the intronic sequence on one or both sides of the at least one exon.

33. The method of any one of claim 1-10, 21-23, 26-28, or 30-32, wherein W=2, 3, 4, 5, 6, 7, 8, 9, 10, 11, 12, 13, 14, 15, 16, 17, 18, 19, 20, 21, 22, 23, 24, 25, 26, 27, 28, 29, 30, 31, 32, 33, 34, 35, 36, 37, 38, 39, 40, 41, 42, 43, 44, 45, 46, 47, 48, 49, 50, 51, 52, 53, 54, 55, 56, 57, 58, 59, 60, 61, 62, 63, 64, 65, 66, 67, 68, or 69 or more; and X=3, 4, 5, 6, 7, 8, 9, 10, 11, 12, 13, 14, 15, 16, 17, 18, 19, 20, 25, 30, 35, 40, 45, 50, 60, 70, 80, 90, 100, 125, 150, 175, 200, 250, 300, 350, 400, 450, 500, 600, 700, 800, 900, 1,000, 1,250, 1,500, 1,750, 2,000, 2,500, 3,000, 3,500, 4,000, 5,000, 6,000, 7,000, 8,000, 9,000, 10,000, 12,000, 14,000, 16,000, 18,000, or 20,000 or more.

34. The system of any one of claim 10-13, 24, 25, or 29, wherein W=2, 3, 4, 5, 6, 7, 8, 9, 10, 11, 12, 13, 14, 15, 16, 17, 18, 19, 20, 21, 22, 23, 24, 25, 26, 27, 28, 29, 30, 31, 32, 33, 34, 35, 36, 37, 38, 39, 40, 41, 42, 43, 44, 45, 46, 47, 48, 49, 50, 51, 52, 53, 54, 55, 56, 57, 58, 59, 60, 61, 62, 63, 64, 65, 66, 67, 68, or 69 or more; and X=3, 4, 5, 6, 7, 8, 9, 10, 11, 12, 13, 14, 15, 16, 17, 18, 19, 20, 25, 30, 35, 40, 45, 50, 60, 70, 80, 90, 100, 125, 150, 175, 200, 250, 300, 350, 400, 450, 500, 600, 700, 800, 900, 1,000, 1,250, 1,500, 1,750, 2,000, 2,500, 3,000, 3,500, 4,000, 5,000, 6,000, 7,000, 8,000, 9,000, 10,000, 12,000, 14,000, 16,000, 18,000, or 20,000 or more.

35. The method of any one of claim 1-10, 21-23, 26-28, or 30-33, wherein said plurality of genes comprises at least 2, 3, 4, 5, 6, 7, 8, 9, 10, 11, 12, 13, 14, 15, 16, 17, 18, 19, 20, 21, 22, 23, 24, 25, 26, 27, 28, 29, 30, 31, 32, 33, 34, 35, 36, 37, 38, 39, 40, 41, 42, 43, 44, 45, 46, 47, 48, 49, 50, 51, 52, 53, 54, 55, 56, 57, 58, 59, 60, 61, 62, 63, 64, 65, 66, 67, 68, or 69 genes listed in any of Panels A-Q.

36. The system of any one of claim 10-13, 24, 25, 29, or 34, wherein said plurality of genes comprises at least 2, 3, 4, 5, 6, 7, 8, 9, 10, 11, 12, 13, 14, 15, 16, 17, 18, 19, 20, 21, 22, 23, 24, 25, 26, 27, 28, 29, 30, 31, 32, 33, 34, 35, 36, 37, 38, 39, 40, 41, 42, 43, 44, 45, 46, 47, 48, 49, 50, 51, 52, 53, 54, 55, 56, 57, 58, 59, 60, 61, 62, 63, 64, 65, 66, 67, 68, or 69 genes listed in any of Panels A-Q.

37. The method of any one of claim 1-10, 21-23, 26-28, 30-33, or 35, wherein the plurality of genes comprises gene numbers between Y and Z of any of Panels A-Q and Y=1, 2, 3, 4, 5, 6, 7, 8, 9, 10, 11, 12, 13, 14, 15, 16, 17, 18, 19, 20, 21, 22, 23, 24, 25, 26, 27, 28, 29, 30, 31, 32, 33, 34, 35, 36, 37, 38, 39, 40, 41, 42, 43, 44, 45, 46, 47, 48, 49, 50, 51, 52, 53, 54, 55, 56, 57, 58, 59, 60, 61, 62, 63, 64, 65, 66, 67 or 68 and Z=2, 3, 4, 5, 6, 7, 8, 9, 10, 11, 12, 13, 14, 15, 16, 17, 18, 19, 20, 21, 22, 23, 24, 25, 26, 27, 28, 29, 30, 31, 32, 33, 34, 35, 36, 37, 38, 39, 40, 41, 42, 43, 44, 45, 46, 47, 48, 49, 50, 51, 52, 53, 54, 55, 56, 57, 58, 59, 60, 61, 62, 63, 64, 65, 66, 67, 68, or 69.

38. The method of any one of claim 1-10, 21-23, 26-28, 30-33, 35, or 37, wherein said plurality of genes comprises gene numbers 1 & 2, 2 & 3, 3 & 4, 4 & 5, 5 & 6, 6 & 7, 7 & 8, 8 & 9, 9 & 10, 10 & 11, 11 & 12, 12 & 13, 13 & 14, 14 & 15, 15 & 16, 16 & 17, 17 & 18, 18 & 19, 19 & 20, 20 & 21, 21 & 22, 22 & 23, 23 & 24, 24 & 25, 25 & 26, 26 & 27, 27 & 28, 28 & 29, 29 & 30, 30 & 31, 31 & 32, 32 & 33, 33 & 34, 34 & 35, 35 & 36, 36 & 37, 37 & 38, 38 & 39, 39 & 40, 40 & 41, 41 & 42, 42 & 43, 43 & 44, 44 & 45, 45 & 46, 46 & 47, 47 & 48, 48 & 49, 49 & 50, 50 & 51, 51 & 52, 52 & 53, 53 & 54, 54 & 55, 55 & 56, 56 & 57, 57 & 58, 58 & 59, 59 & 60, 60 & 61, 61 & 62, 62 & 63, 63 & 64, 64 & 65, 65 & 66, 66 & 67, 67 & 68, or 68 & 69 of any of Panels A-Q.

39. The method of any one of claim 1-10, 21-23, 26-28, 30-33, 35, or 37-38, wherein the genes chosen from Panels A-Q comprise at least 1%, 2%, 3%, 4%, 5%, 6%, 7%, 8%, 9%, 10%, 11%, 12%, 13%, 14%, 15%, 16%, 17%, 18%, 19%, 20%, 25%, 30%, 35%, 40%, 45%, 50%, 60%, 70%, 80%, 90%, 91%, 92%, 93%, 94%, 95%, 96%, 97%, 98%, 99%, or 100%, of the plurality of genes to be analyzed.

40. The system of any one of claim 10-13, 24, 25, 29, 34, or 36, wherein said plurality of genes comprises at least 2, 3, 4, 5, 6, 7, 8, 9, 10, 11, 12, 13, 14, 15, 16, 17, 18, 19, 20, 21, 22, 23, 24, 25, 26, 27, 28, 29, 30, 31, 32, 33, 34, 35, 36, 37, 38, 39, 40, 41, 42, 43, 44, 45, 46, 47, 48, 49, 50, 51, 52, 53, 54, 55, 56, 57, 58, 59, 60, 61, 62, 63, 64, 65, 66, 67, 68, or 69 genes listed in any of Panels A-Q.

41. The system of any one of claim 10-13, 24, 25, 29, 34, 36, or 40, wherein the plurality of genes comprises gene numbers between Y and Z of any of Panels A-Q and Y=1, 2, 3, 4, 5, 6, 7, 8, 9, 10, 11, 12, 13, 14, 15, 16, 17, 18, 19, 20, 21, 22, 23, 24, 25, 26, 27, 28, 29, 30, 31, 32, 33, 34, 35, 36, 37, 38, 39, 40, 41, 42, 43, 44, 45, 46, 47, 48, 49, 50, 51, 52, 53, 54, 55, 56, 57, 58, 59, 60, 61, 62, 63, 64, 65, 66, 67 or 68 and Z=2, 3, 4, 5, 6, 7, 8, 9, 10, 11, 12, 13, 14, 15, 16, 17, 18, 19, 20, 21, 22, 23, 24, 25, 26, 27, 28, 29, 30, 31, 32, 33, 34, 35, 36, 37, 38, 39, 40, 41, 42, 43, 44, 45, 46, 47, 48, 49, 50, 51, 52, 53, 54, 55, 56, 57, 58, 59, 60, 61, 62, 63, 64, 65, 66, 67, 68, or 69.

42. The system of any one of claim 10-13, 24, 25, 29, 34, 36, or 40-41, wherein said plurality of genes comprises gene numbers 1 & 2, 2 & 3, 3 & 4, 4 & 5, 5 & 6, 6 & 7, 7 & 8, 8 & 9, 9 & 10, 10 & 11, 11 & 12, 12 & 13, 13 & 14, 14 & 15, 15 & 16, 16 & 17, 17 & 18, 18 & 19, 19 & 20, 20 & 21, 21 & 22, 22 & 23, 23 & 24, 24 & 25, 25 & 26, 26 & 27, 27 & 28, 28 & 29, 29 & 30, 30 & 31, 31 & 32, 32 & 33, 33 & 34, 34 & 35, 35 & 36, 36 & 37, 37 & 38, 38 & 39, 39 & 40, 40 & 41, 41 & 42, 42 & 43, 43 & 44, 44 & 45, 45 & 46, 46 & 47, 47 & 48, 48 & 49, 49 & 50, 50 & 51, 51 & 52, 52 & 53, 53 & 54, 54 & 55, 55 & 56, 56 & 57, 57 & 58, 58 & 59, 59 & 60, 60 & 61, 61 & 62, 62 & 63, 63 & 64, 64 & 65, 65 & 66, 66 & 67, 67 & 68, or 68 & 69 of any of Panels A-Q.

43. The system of any one of claim 10-13, 24, 25, 29, 34, 36, or 40-42, wherein the genes chosen from Panels A-Q comprise at least 1%, 2%, 3%, 4%, 5%, 6%, 7%, 8%, 9%, 10%, 11%, 12%, 13%, 14%, 15%, 16%, 17%, 18%, 19%, 20%, 25%, 30%, 35%, 40%, 45%, 50%, 60%, 70%, 80%, 90%, 91%, 92%, 93%, 94%, 95%, 96%, 97%, 98%, 99%, or 100%, of the plurality of genes to be analyzed.
